United States Patent Application Publication US 2023/0172999 A1 - sequence listing, part 14

SEQ ID NO: 14 - DNA, 2966205 bp, Faecalibacterium prausnitzii (residues 1-1,483,103 of 2,966,205)
  misc_feature (161170)..(161179): n is a, c, g, or t
  misc_feature (383065)..(383074): n is a, c, g, or t
  misc_feature (430173)..(430182): n is a, c, g, or t
  misc_feature (1093868)..(1094026): n is a, c, g, or t
  misc_feature (1170393)..(1170402): n is a, c, g, or t
  misc_feature (1446581)..(1446590): n is a, c, g, or t
  misc_feature (1474504)..(1474513): n is a, c, g, or t
  misc_feature (1560403)..(1560412): n is a, c, g, or t
  misc_feature (1749924)..(1749933): n is a, c, g, or t
  misc_feature (2189109)..(2189118): n is a, c, g, or t
  misc_feature (2217052)..(2217237): n is a, c, g, or t
  misc_feature (2218243)..(2218252): n is a, c, g, or t
  misc_feature (2221953)..(2222026): n is a, c, g, or t
  misc_feature (2305635)..(2305644): n is a, c, g, or t
  misc_feature (2362276)..(2362285): n is a, c, g, or t
  misc_feature (2431131)..(2431140): n is a, c, g, or t
  misc_feature (2452742)..(2452751): n is a, c, g, or t
  misc_feature (2477741)..(2477750): n is a, c, g, or t
  misc_feature (2495242)..(2495251): n is a, c, g, or t
  misc_feature (2546162)..(2546171): n is a, c, g, or t
  misc_feature (2550908)..(2551080): n is a, c, g, or t
  misc_feature (2656520)..(2656536): n is a, c, g, or t
  misc_feature (2816876)..(2816885): n is a, c, g, or t
  misc_feature (2824352)..(2824361): n is a, c, g, or t
  misc_feature (2964451)..(2964682): n is a, c, g, or t
cgggtcgtactcaacttcaacttcacggacgatgccaagacggtcacccgtgaggaagtgttgggttcgagtgctgtggagaatgctccaccacatccccagaccatttggtctggggatttttttgtgtcatttgccagcccggaacagcaaaccgggaatttcactctatcgggggtgttctttccttggcaggtgtggtatactcggcttagttcaacaaatctggatttggagggttgaatcatgtggaatgaattaggtatcagcggaggaaccgcaattgttattttaattgcgctgtattatgttatcaaatgggcagtgagaaacggcatcaaagaagcgtatcgtgctatcacgggagagaaaaccaatgaagatatccaaaacgaaaaagagctgaaagaacttggcttagattcagaagatcaataaatccgcactcgttcccggcaaagagcagcgcacaaaaacccacataaaggagatgcttccccatggaatacaaacgttttggcaataagatcattgtccgcatcgacaaggacgaggagatcctagaacaggtcaaaaaacttgccctgaaagaaaacatccgccttgccgccgtgcaggcgctgggtgctaccaacagcttcacggtgggcgtatataatgtggtagaaaagcaatactacgccaacagcttcagcggcagctttgagatcgtgtccctgaccggcaccatcaacaccatgaacggtgaattctacacccacctgcacatgagcgccggaaacgacaagggcgaggtgttcggcgggcatctgaaccgggcggtggtcagcgccacctgcgagatggtggtggatgttctggacggcacggtagaccgccaatacgaccccgttaccgggctgaacctgttcaagttctgagcttcttttcaaaaacgagaaagaccgctgcgcgatgtctgcgcagcggccttttgtttatagctcttcccggcgggtgtagggcgtcatgccgtggtcggcggggtcgtaggcttccagcacggtaatgtagttttcctgaaagtggcacaatacggtctttaaaatgccgctcagctgcccctttaccgtgatggtggacaggacaaagtctgccaccagctgcaccgtctccggctgcagctcaaagcacaggcccaccgccagcatagggatgacgatctgctgcgcctgcagcggcaccgcgctgcccagcttttccagtaccggacggctcagcgccgaggctgcctgtacgcagcgctccaccttttcctgcgggaagcgctgcatcagttccatgctgcgcagctgcgccaccacggcggcatcatcgcgcacgatgccccgggtcacttcttcctccgtgcgggtggtcgcgcattgcagcatacagcgcatggcgtcctcgtagtcctcgtagtaggtctgacggtcgcagaacaggtccagcatggagcgcagcacggcatcggtctcctcggagaccgccagccgcccgaaatctatcggcgtgccttccatccctgcgctgcggtcattcagcgcctccagctcctccgggatgaccgtggaaggcagaaagcggtcgttgccgttgcggtaaaagccccactctgcgggcaggatgcgggggatgacatcgccgctggaaacgatattgaagatgttgctggtaccccagttctttttcaggctgccgtctgccgcgtggttgttgtcataatcctgctgtaaatcggggcagtctgccgccgtcagggacgccggggcggcaaaggtatagacaaaggtgtttttcttttccagctgcggcagcacggcgggcaggcgcgccgccacaaggttggccacaccgccgccccggctgtaaccgcccatccagagcttcagggtgcccagcggctgacgctttgccgacgtctgaacgtatcctcgtattttttcaaccagctgccgcgccgccgtcacaaagccgacgtgggcgctgcccggccctgcatgaaggttgccggaccactcggccccgtagccggagccgcgcaggaacgccccgataatggtcacctgcctgccgccgcgcaccagcgttttgcgggcgatggcgcagcccacggtgtccggggtgtcgttcaggctgtgggtatagttgaacagctgcacctcagtaaagcccagctttgcaaaggcgtcccggatatggtcggcgcggccgacctccccctccatccaatagcgctggtcgctctcccacgggcagtcggcggctgccgccatgcccaaggtggccagcgccagctggttgtcgtactccgtggccgggtggtcgaacaggctgtcgctgtaatagtagtcgtgccgcaggtcggcaccgcagcggtcgctgcggtaccacagggtatagtagtcgtccggcacggcgcggccgaccaaggctgtagccgccccggcctgcggcagcgccgcagcgggtgccagcgcacccgccgcaagggtcaccgcaagacccttacaaaaatcccgtcgtttcatggtttcatcccccgcatccgctcctgcggcctgtgcaccgcaggcttttttatagtataaacctttttgccgtaggatgcaatttttacttgcagcggcagacgggacggagacaccccttccgtcatcgcctgcggcgatgacaccttccccaaggggacggctttagagacggcggcaaactttccggcatagcccaaaggcgtccccgagagggatgacttcccccgttccgggggaagatgtcaccgcaggtgacaaaaaggggaatctggctgcgaacgcagtgagcagactgagggggtgaaggcgccgccttttatctctacactctctgtaaaaaatcaaccgggaagctccgcagaacttcccggttgacagctacaaaaatattctttattacagcgaaagatccagttcgtggcagtactccacgatgtggtggaacatctgctccacggcgggagccatggaggccgggcgctgcacggccaagcccaccacgcggtactcctccggctcgatggggtacaccttgacggcggctttgcagtcccgcagcagcatctgcggcatgatggagatgccaagtccggcctccaccatggcgatattggactggtcgtcgatgacgtggcagcggcgctcggtgccgattttgtatttcttgaggaactggcgcatctcggcgtcggtggcatcgcactgcaccacaaagctctggccgttcatcagcgccggagtcatcacgccgtcctgcggctccggccagtcctgcggcacgatgcacagcagcggctcccggaacagctcggtgaggttgaactcctcccggcaggtggaggacaggaaggcgatgtccacctgaccggtgcgcagccattccttgacatcatcgtaggtgccctgatatacttcgatctcgatctgcggataatgcgccgcaaagcttttcagcagcccgggcagcagcgatgcacacaccgagttgaatacacccagcttcaccttgcccttttccaagccattcaggcgggcgatgctctgcttcagcgcctcgtcactgttgagcacatcgcggatagaaggatacagggaagcgccgtaactggtcatggatacgccgtttttgccgcggttgaacagggcaaagcccagctcctcctccattacggcaatggcgtgactgatggccgagggggtcaggtgcagctgctgtgccgccttgttgaagctgccctgccgagccacggcatcaaaaatttcgtaggaaaaaagcgtcatgcccaaagcctccttccgtctttcctggttcggagacgcccgattctctgtgaatctttttcatctttcatttgagatagttcaattatcttcttgattgtactatcccgcgccttttctgtcaagcattttgccccgatttttgcacgttctgtgcagattttgccgcgatttttgcaggaaatgccgcctttattacgttatagttcctgtaacgatttttaacgacctgaacgaggtgtttttatgaccgcactttccccgcgccgcactttcagcggcactgctcttaaaaccattgcctgcattaccatgctggtggaccacatcggcgcgtcctgcatcgaggcaggcatccttacgcccgggctggacgccggcaccctctcgcaggacaccctttctgcctacccgctgtaccggctggacatggtgctgcgcttcaccgggcggctggcctttcccctgttctgctttttgctggtggagggctttgtgcacacccacaacgtcaaaggctaccttgggcggctggtgctgttcggccttctgagcgaggtaccctttgaccttgcgttcttccgcaccccctttgaccccagtgcgcagaacgtttactggacgctggcgctgggcgtgctggctatggcagggctcaagcgctttgaaaaggaaaacggcctgcccggctggcaggggcttgtatgggcgggcgggtgcgccgcgctggcgctggctgccaataccgactacaacgccagcggcgtgatcatcatctgcgcgctgtacctcacccgcacaaaccgcaagtggcagtgccttgcgggcgcactgctgtttatgttcgagctcaccgccccgctggcctttgtgctgatctggttctataacgggcagcgcggtgcgtgcagtccattgcagaaaaaggccttttactggttctacccggtgcacctgctggtgctggcaggcatcacgaacctgctgctgtaaagcttttccggttcagctggctcaccgctgcaagacgagacgatcgggaatgccctccgcgttgctctgggcatattcagcggaaagattatttataattttggggttctgaaaagcccgcggagcttgtcggggcaaagcccctccatctgcttgcgcagaccgctctgccgcttaaaagccccactggggctttcattgctgcgcaaacgcgggcttttcagagcccctttttcacgagtaaaaaacgctacaaaaaggaaaatcccccgcagttttcacgaaactacgagggattttcttggcggagtaggagggatttgaaccctcgcgccgttgtttagacgacctacgcccttagcaggggcgcctcttcggcctcttgagtactactccagagcaaagtgtgttacacttattcaataaaaaatggcggagagagtgggattcgaacccacggtacgttgccgtacggcagttttcaagactgcttccttaaaccactcggacatctctccttgtggacactcgcgttacgccgtgtcgaatgcctatttactttaccagatttgcgccgttctgtcaagcccttatgcaaatttttcttttttctgtacgatagctgcacagcaggcgcatttatcacaacctttattcgaagtttttttggattttctctttacagaaacatccttttgttgtataataaaaccaacataaaccacccattgggaaaaggagcatcatcatgtcgttttcagagctattgaagcagtgccgcaaaaagcagggcgtcagccaagcggagcttgcctccagactgggggtcacccagcaggctgtcggcaagtgggaaagcggcaagtcctcccccgatccctccaccgtggcccgcattgcggaactgttgaacaccacggcggactatctgctggggctgtaccgcccggtcagcaacgtttctgcccccgaggagcgctttttcggcagctacaccgagagcctgatcccggtcatcggcacggtgaaggccggttacggcgcactggcctttgaagaggactacgggcaggagtacgcccgcgtaaaggatccctccaactatttttatctggtggtgcgcggcgacagcatggagccccgcattcaggatggcgaccttgcgctggtgcacaagcaggacacgctggaaaacggcgatctgggcgtactgatctacggcgacgagggcgagggcaccctgaagcgctacatccagcgcggcaactgcgtggtgctgcagcccttcaaccccgcctatcatgaaatggtcatcaggggcgaggacctgaaccacctgcacattgcaggccgcgtggtggaaaccaaggccaagtggtaagcggaaccctctcagtcatcgctacgcgatgccagattcccccttttgtcgctgcgcgacatcttcccccggccgggggaagtctttcctctcagggggagcttatagtactgccataagcttttattgttcatccgatactttttcgttatcgcaaaaaagctccccctttgggggagctggatgcgaccaacgggagcagactgagagggttcgaggccaaagacgtcccccctgtttttcataaagccatctgctgttttgcgtatggctttattttttgaccctttttcccggttttatcccctatggaggtgcattctgcatggaacagaccctgatggacaagctgaccattctggcggacagcgccaaatatgacgttgcctgcacttccagcggggcgtcccgcaccgcgcgcccgggcacggtgggcagctgctatgccccgggctgctgccacgcctttaccgccgatggccgctgcgtcagcctgctcaaggtactgatgaccaactgctgctccttcgactgcggctactgcgtcaaccgccgctccaacgatatcccccgcgccacctttgcgccccgggagctggcagagctgaccatggaattctaccgccgcaactacatcgaggggctgtttttgtccagtgcggtgctgggcaccccggactacaccaccgagcggatgctggcggtgctgcggctgctgcggggcgaataccgctttgggggctacatccacgccaaggccatcccgggcacaagcccggaacttttgcagcagctggggtatctggccgaccgtctgagcgtgaacgtggaactgcccagcgagcgcagcctgaacctgctggccccggacaaggggcggcactccatcttccgtcccatgaagcagatcgcgatgtccggcgccgccagccgggaggaacttaccctttaccgccacgcgcccaagtttgcccccgccgggcagagcacccagatgatcgtgggcgcttcgccggagacggactaccacatcttaaaactgaccgaggggatgtaccagaagtacgggctgaagcgggtgttctactccgcttacatcccggtagccgaggacacccgcctgcccgcgctggacaccaagccgcctcttctgcgggagcaccggctgtatcaggcagactggctgctgcggttctaccagttcgaggcggacgaaattttagataaggataaccccaacttcaacccctatctggatcccaaatgcaactgggcggtgccgcactatgggctgttcccggtggacgtgaaccgcgcccccttcgagatgctgctgcgggtgccgggcatcggccccaaaagcgcccggcgcatctggcgcgcccgcaagcaggcggcactgggtctggacgagctcaagcgcatgggcgtggtgctcaagcgggcgcagtacttcatcacctgccggggcttttccggggcgcacccggggcgcggcaccgccgggcgggagcgcattacccgagcgctcatcgaccccaacgtattcagcggcagctgcgagcagctgagcctgttcagcccgcccgccgtggacaacctcatcgggcagggcgtgccgccccgggcggctgtccgcatggtaagggaggaggccgtgcaatgtcttgccaaggcactgtaagccccaagggggcgcgcaagctgcacgatgccgacgtggtctacctgtatgacggcagctttgagggctttctgtgctgcgtgtacgaaagctttgcccagcacgagcttccctttgcggtgtggacgccccagcgggaaacggccaccctctacccggtcaaggacattgccaccgaccccgccgttgcccggcgggtgttcgccagctttggcaaaaagctgggcgcagagaccgagtacctcgtcagccgggattttctctccggacaggaggacaaggagctgctgttgctccggtttctgcatctggcctttgcgctgggcccgggcacagtcaaacgggaggggcatccggtggtcgcgcccctctacgccatgaaaaaaagtctggactgggaggtagacaagtttcagggctttgtgcggttcgaggagcacaacgggatgctgggcgcggtcatccaccccaaaaattatatcctccccctgctgcgcccacacttctgcggacgcttcccggaggaggatttcatgatctatgatgccgtccatcaggcggtgctgctgcacgaggggcgcagcacccggctgctggagctggcagcgcccttggagctgccaccgcccagtgcgcgggagcagcagtttcaggcgctgtggacgcagttctacaaaacgctggaaattcaggcgcgccataacgaaaaaggccgcatgacccattgccccaagcgcttctgggcggatatggtggagctgcagggggagttgtaatcatttttcctgtgcttccagtgcgctttccacgcccttgagcagatcctctgccgggatgccgtacagccttgccagtgccatcagattagaggtgttcggctccgaggtgccgttctcccacttggacactgcctgacggcttacgccgatagtctcagccacaaactcctgcgtcatcttgcagcgggtgcggttctccttgagcatctcagaaagcgacttgcgcacgatcttgacttcttctgtaagtttcggcggcttttccagattgcgggcaatgcgccagagcagatagagtgcagccacgatagccaccggcagcagcagccgcacgatcatcgtcgcgatgctcaccgtctggagcgctctgaaaaataggttggtcagaaaatcacttttcatattcgtttcctcctttggaagctttctcttgtggttttttgtggcacgattctagcacaaaagcccggttgcgtccaccaaccagagcgcaaactctggttgcggcgcgtatttttagcctattggggcagataattcacaaaaacgttgcatctgcatcgttgcaacgggcaaaacctatggtatactataagggatatccgggcaggcatttctgcccaccaacacccccgctgcggggtcaacacaaaaggagtattgtagcgttatggttcgcattactatggaagacggtggcatcatcgacatcgagctgaacgaggaagttgcccccatcacctgtgagaatttcaaaaagctggtcaaggaaggcttttacaacggcctgacctttcaccgtgtcatccccggctttatgatccagggtggctgcccgctgggcaccggcaccggcggcccgggctggaacatcaagggcgagtttgccgctaacggcgtgaacaaccccctcaagcacacccgcggtgtgatcagcatggcccgcagcatgaaccccaacagcgcaggcagccagttcttcatcatgcatcaggatgcaccccatctggatggccagtacgctgctttcggcaaggtggttgccggcatggacgttgtggataagatcgctgctgtccgcaccgactggaacgacaagcccaccaccccggtcaagatgaagaccgtggagctcatcgagggctaattttaaattcaaaatagcggaacaccctgcgggtgttccgctatttttttgcaaaaaactctctgtgaaaagggtgccccggagcgtccgcagacgctccggggcactgaaataaaaaatcaaattccttggagcatggccaaagcgcacgcggcggccatttcaaatcgttttcagcagccttctttttcagccagcttgcggcccatgagcacgcccatgaccgaagccatcatcagcccgcgcgtccagccggaggaatcgcccagacagtgcagaccctgaatgttggtgtccaggttctcgtccatcttcaccttgttggagtagaacttcagctccgggctgtacagcagcgtctcgttggcggcaaagccgggcacgaccatgtccagcatcttgatgaactcgatgatgttggtcatggcgcggtagggcatggcggcggtgatatcaccggccacggcatccttcaacgtgggcttcacgttggactgtgccagttccttctgccaagtgcgcttgccgtccagaatatcgccgtagcgctgcaccatgatgtggcctgcgcccagcatattggtcagctcgcccaccttctgggcgtaggcgatgggctggttgaagggctcggtaaagttgtgggacaccagaatggcaaggttggtgttcgggctcttcttttccttaaagctgtggccgttgaccaccgcaaggtcgttgtcgtagttctcctgcgccacaaagccgccggggttctggcagaaggtgcgcaccttgttcttccacggcttcgggtaaccgatgagcttggactcatacagcaccttgttcaccttttccatcacctcattgcggcactccacacgcacgccgatgtccaccgtgccgggcttatgggcgatgtggtgctctgcgcagagcttttccagccagtctgcaccgcggcgtccggtgccgatgaccacctcgtccgcatacacgggcagcaggctatcgccatccttcagcagcacgcccttacagccttcctcttccagaatgatgttctcgcactcggtattgaagcgcatctccacgccgttgtctgccagataattctggatggccagatacagctcctgtgccttctcagtacccagatggcggatggggcagtccaccagtttcagacccgcatggatggcgtttttgcggatctccttgatgtcctcaccggtgtagatgccctccacatgggggtcggcaccaaactccagatagatcttatcggtgtagtcgatgagttcctgcgcaaactcctccccgatgagggtgggcaggtcgccgcccacctcgtaggaaaggctcagcttgccgtccgagaacgcacccgcaccggaaaagccggtggtgatggcgcaggtggggcggcagttgacgcagtggcccacctctgccttggggcagtggcgcttttccaccggcttgcccttttccaccagcagcatcttctttttgctgccgtggcgcagcagctccacagcggtaaagatgccggcagggcctgcacccacgatgatcagatcgtacttttccatgattttgttcctttttccttttcttgataattggtgtagaatcctctcagtcaacgcctgacggcgttgactgagagggtttattccttactcccgcttctcctgctccacggtagcgctctcgtccacatggtccagttccacggcggtagcctctgcatcggtgcgggtcacgtccggggcgacaacgccgtcgccgttcaggtcctcaccggtaatgctttccagtacggactgcgtttcagggtgcagcttggcaaagcggcgcacggccagcacggtgtacagagcgctgagcaggttgatggcgccctccacgatcaggatgacgccgatggccatcaccagtgtttccatggcgccgaaggggtttgcaatcaggatgacgcccagcaccacgctgagcaccggcagcagcagaaagcccttccagctgtcgtagccgcagcggcgcaggtccaaggcgttctgcacccggccaatggcgtcaaagatgacgaacaggccgaacacgatgggcaaaatgcttaccacgatatcgctgcgcagcagcagaaaaacacccagtgcaaggcagataaggccggagatcagggtaagctggctctggaacaccccgcgctccaccacaaagtagcggatcagctgcaccgctgcgcaggccagcaccacgccgcccagcgcgtagcagacgatgttcagcgccgtgccgggcttcatgaccagaaaaatgcccagcccgacgtacagcaggctcatgaggatcagattccacttcagcttttttaccatagagatcacgttcctttcgtttgcagggccgctgcccgcactcgggtcagtggtacaggggtgcgatggtggtcttgttgatacgggcatagaagaccaggctcatcaggatgctgacgacttccgcaatgaggaaggcccaccagacattgttgacgctgccggtctgtgccagcagccacgctgccggcagcagcacgaacagctggcggcagaccgaaacgatgaggctgaagacgccgttgcccaacgcctgaaagaccgagctgagcacgatgctgacgcccgccaacaggaaatgcaggcagatgatgcgcatggccgggatgccgatggcaagcatggcgtcgctggcggcaaagatgctcaacacctgccggggtgcgaactggaagatgcagaagcctgccagcatgatgccttcggcgtagcacaccgccagcttgatggtctttttcacacggttcggtctgcgggcaccatagttgtagctgatgatgggcaccatgccgttgttcaggccgaaaatgggcataaacacaaagctttgcagcttgaagtagacgccgaacaccgccaccgccgtagcggagaaggccatcaggatcaggttcatgccaaaggtcatcagactgcccacacactgcatggcgatgctgggcagacccacggtgtagatgcggccaatggccttggcgctgggacggaagcctttgaagctgatctggatatccgggtttttgcgggtgttgaagtacagggtcatgcctgcgccgcagaactgaccgatgaccgttgccaccgctgcgccggtggtgccggacagcgcctcgccgcagtagccgaagatgaagatggggtccagaatgatgttcaccacggcacccaccagctggctgatcatgctcagataggtgcggccggtagccgccagcagcttttcgcccatggtctgcgtgaacagacccagactgaagttgcagcacaccgacagataccggatgccctgctgcgcgatgacggggtcactggtctgggcgtagaagtagggcttcatgcaggtaaggccgatgacaaaaaacaccgcaaagctgcacagggaaaggaagatgccgttttctgcggtggcgttggcgcggctctggttcttttcgccaaggctcttgctcagcagggcgttcacgcccacgccggtgcccacgcccacggcgatcatgacattctgcaatgaaaaggccagcgatacggcggtaagggcgctttcgctgacatgggacacgaacaccgagtccaccacgttgtacagcgcctgcaccagcatggagatcatcatcgggatgctgagtttcagcaaaagcgggttgatctccatggtgcccatgatattttcccgcacctcggcgggtgcggtctgcgattgatttgttttcacgatttctccttgccggaaacatgggcagggcgcagaagcgccctgcccacgttctgtcgttgtttattgggtctggctgggggtcacagcgtcttttccttggcggcagctgcgtccaggatcatctttacgcaggtctcgcggccaagggcggcgttgatggccagatcgtagttatgggcatcgccccagcggttctgggtgtagtagttgtagtaggccgagcggttgcggtcggtcttttccacctcgtccttgatgcccttttcgtccttggcctttaccaaggggttggtcttggcgtactgcaagcgccactccttgggtgcatacacgaacacccgcagcacgtccttgcgctcccgcaggacgtagtcaccgcagcggccaaggatcacgcaggggccttcctcggccagctgcttgatgatacggctctgcagaatgaacacctgatcgcccagcggcagctcgttgcccatggtgtacaggctgtacagcaggctgtgggtgtgccgtttctcgctggcggcaacagcctcctccgacaagccggagttctttgctgccatggtgatcagctccttgtcgtaaagcttgatgcccagcgcatttgccacgtcctctgcgatgaagcgtccgccagtgcagtactcacggcccaaagtgatgatcgtctttgccataatgtgttcctcctgtttcatatatcgccctgaaaaagcttacggctgtgccggggcgtccccggtctggccattggctttgggttctgtgcttgcaggtacaggcttcggcttcggcagccgtacctctgctacccgcatggtgccggtctggtccactgcatacacgctgcatcgcccgcctgcggccagcagctccggcgggaactgtaccccgccgtcctcggtgcgggtacagcgcaaaaaggtgcggtgagcggtggtggcgtgcgccacgccgtcgtggggcgcgcaggcgatccagccggaaaaatcctccggcaggtctgcgggctctccccgccgctcaaagtagtaaacgcccggctgggtgccggcgcgcagctcgcagcgcagccgccggggacggtcggcctcaacctcccgctgctttggccgcaggacaatggccttgccggtaaagtaacgcataaaatccaccagcgccatggtgcagttcaccgcgccgtcggtatcggcggtggggtcgttcagcagcacaaaatctgccatcacggcgtcatcgtggccaaaaccgtgcagccccatccacagccgcaccgggtcgcgctgaccgcgcacccgccgctccacctgcaccgctaccgagcagccgtcgtggatctgctcccgcaggtcagcaaggtccatccatgcctgccagcaggggtagccgcagcagcctgcggcggccgccgcaaaggcagtgttgccggtgctgcgggtgctgccgtcctccatggcgtaggccacttcttccggcaggatatcctcgccccagcggttcatcagcgccgccatgaccagcggcagatccatttcccgcccaaagctggggtcatgggcggaaaggcagtattccggcagatagagccgccggttcagcgcatggccgttgcgcttttcccacgcaaggggacgcaccgccgccgccagcagacgcaccgccggggtaactttatcgttgttagtggaaaggttcacctgcaattgcacgccggtgccgccgcccggggcggctaccgtgacggtatcgcccatcaaaaagatcatgccgtcctcgctctggctggacacgctgcaccgggggtaatccggcgcccacttgccaaagctcatccaagctgtccacgcccctgctgcgtacacccggcagcgcacctccaccatggtgtcccggggcgcatgggcgttccagctgacgttcagattgcagaacgccggcatggcgaattccggggtggtgtagctgccgtacaaaaggctgcgcccggccacgctatccagcaccagtgcgccgttttccagcgcaaggttgtccagctgcccgcgggaaaaggtctctgtcccctgcagcacaagattattccgttgttccatgggacatcgctcctttccgcagttttatcgcttattcttccggggtgtcgtcgtcggcgtagtcctccttgagggctgcttccagctcggcgtccttcatcttgcggatgttctcctcgatgtggaacacccggtcgatatcgccgtacacgatctggcaggacacctcggtgacgaaccagaaaccgaagatcagcatcaggaaaagccccagcggcatgcacaggatcaccacaccccagaacagcacctgcacgatggcggcagccagtgcatggggcaaaaaggcgatcatgcagttgatgctgtttttcaaagtcaggctcaagggctggtccagcagcaccacctgcggccacatataggcaaacagcatctggaacagcaccagattgagcaccgtagctacccacagcggaacacccacgttggtgccatggtacagcatattgaagcagaaatagacgaggaaaatttgcagcgtgaccaccacggtgtacagcacaccgggcacaaggctggccttgaagttgcgcttgaaggccttgcggtaggtcacccaccagtagcccgcctcatcgcgcagcgcgcgcaggacggtatcgtacattccggccagcgccgggcccgccagcagaccgcccacggcggcgctgcccagcatcaccggcagactgttctgcaaaaagccgatgtacaccagacagatgaccggtgcaaacccgatgcaggtcagcaggtttgcaaggaacatcccgttcatatcacggcctacaagctcaaaaaagcggccgatgccggtcttgcggggggcatccttttcgacccccttaccggccttgaaatcgttggcagaaggaaaaagacccatagtaactgcggtacctttcttacgtttttaaccggcaccgcaggcgttttgtctggaaagtgccattgtgctaactttacagatataaatatacctgtattttgtcaactttgcaagatacaaccggggctaattgtaaaaaaatatttatctctcccttttttacgcaaaatgtgctacaatgacaatggcattttttgcaataggaggaaactattatgagcattcttcgcaccattgcgatgtttatttatctgttcgggtacatgatcctgcattacggcatcctgcgccgcgccgagcgcgccgcagccgccggagataccgccaccgtggagcagatcgtgaaccagcacatcccccgctggagccggggcatcctgaaggtgaccggtgtttccctgtcagtagaagggctggagaacatccccaaagaccgcccctgcgtgttcgtggcgaaccaccgcagctactacgacatccctttgctgctggcagggctggaaaagccccacggcatccttgccaaggaggagctggaaaagatccccctgctcaaccgctggatgaagctgctgggctgcgtgttcgtgcagcgtgatgatgtgcgcgcctcggtgcgggcgctgaacgatgccaccgccatcgtggagggcggccgcagcttcgtcatcttccccgagggtacccgctacaagggcgaagagggcggcgcaggcgagttcaaggccggtgctttccgcattgcggtcaagaccggtgccccggtgatacctgtggctgtgaccggtgcccgcgccctgttcgagacaaacggcaaccgctgccgcccgggcagtgtgcgcatcaagatcatgtcgcccatccagaccgccggcatgagcaaggccgagcagaagcagctgcccgatgccgtgcgccagagcattttggctgccctgaagtaacagcctttcccgcccgtttcatcacacaggagaactattttatggcaagctaccgttacgaacgcgacatcgaccccaaggacctcaagccccgcaaacagcggcagtacagccgcagggagcgctgggcaaactggtgggactacaacctgaaatgggtgctcctcttcggcattgcgggtgcgttcgtggcgtactgctttatcgggcagtatttcctgaccacccacccggattacaacgtggcggtggtcagcccctactacctgcccgaagccaccgtcaccgccctgcaagagcagcttgccgcctacggcgaggactgcaacggcgacggcaaggtggtggtgaagatcaaccagtacaccatggctttcaacagtgaggactcggacgcctatctggatatggcaggcaccaccaagctttccaccgatatccagagctccctcagttccatctttatcctctacgaccccgcaggcttccagcaaaccaccggcaccctgcgatatctggacggccatctgcccaagtccgatgccgacagcgactggtggaacatggtctaccgctggacggactgcccggtgctgaccgggatggagctgggcagctacacctcggacgcggtgcagagcgccagcggcgacagccagcagctgctggcagattactatatcggcatccggggcgcatggctgaaggaatccgcttccctgctggaaaacagcgagcccctttgggcaaacctgaccgccggggctgtctccaccgccggggaggggcactgaagatgcgcttccgcatcaaagccggcggtcctgccgcacggttcacctttgaccgcaccccaaagccccagccgcccgcgccgcctgtcctccgcgccgcagaccttgataacccctacgggcgctattacggcaaagcccgcagctgggaggatattttgaaaaataaaaacagcgattgagaggctctccggtcgtcgccgcaggcgatgaccggagagcctctgttttctattttcgtctttttacccatggctgatttgaaattttctccactctcaaatggagggcggtttgttgtttctctgtcccggttatggtatacttactaggtatccccgcaaaaaccgaccaaaaaggatgtgacccccatggacgcactggaacaagcccgtgccgagatcgacacggtggatgcgcagctggctgcgctgttcgagcgccggatggctgccgttttacaggtggccgaatataagcgggcgcacggcctgcccatctacgatgccgcccgggaggccgccgtgctggaaaaggccgcagcccgcattcagcagcctgcgctgcgcccttactataaagaccacgtccagcacatgatggacatcgccaagcagtacgaggctgctgtgctggggcgcaaccgcgccgcctatcagggggtggagggggcgtttgcccacatcgccctcaaggcgctgttcccccacgccgaggccgtgagctactccacatgggacgaggtattcgaggccgtggcctccggcgaagccgcccacggcgtagtgccctttgaaaacagccacgccggggatgtttctgccgtgctggacctgtgctataatcacccggagctgtgggtggtggacgtgtacgacctgcccatctcccagaacctgctggtgctgccgggcacccagctttcccagctgcgcaccgtgtacagccaccagcaggccattgcccagagcgagacctttttaaagcagttccgtctgcccgccaccgccatggcaaacaccgccatggctgcaaagttcgtggcagaaagcaaagacccgacaaaggccgccattgccagcgccgagactgccgccctgtacggactggaaattctggtgcccaacatcaacaccgacggcgacaacaccacccggttcatcgtgctcagccgcgaaaagcccacggcgggcaaccggttctccctgcttttcacggtggacaacaagcccggcaagctggccgaggtcattcaggtcatcggtgccagcggcttcaatatggagtccatcaagagccgccccatgccgcacgttccctttgaatattatttttatgtagagctggtgggcgatgccgccgccggcgagaccgccgcgctgctgcgcgagcttgaccgcacctgccggacggtgcggctgttaggagtgtatacaaaatgagtgattttatcggaaccaagctgaccatgaatctgggcgagcgcagctacgacatcatcgtcaagcgcggctcgctggaaaacctgtatcagttcgcccggctggaccgccgggtggcggtggtcaccgacagcggtgtgcctgcacagtacgcccagatggtagccgaccagtgcaaggatgccgccatcatcacggtgccgcagggcgaggccagcaagagctttaaaattctggagaccgtgctgcggcagatgctggacttcggcatgggccgcggcgaccttgtggtggccgtaggcggcggcgtagtgggcgaccttgccgggtttgccgcttccatctatatgcgcggcatcgattttatcaactgccccaccaccaccctttccatgatcgattcctccatcggcggcaagaccgccgtggatctgggcgacaccaagaacatcgtgggtgccttctggcagccaaagctggtcatcgtggacccggacaccctgtccaccctgccccgccgccacttcatcaacggtctggccgaggcggtcaaggccgggcttctggccgacccggagctgttctccatctttgaaaaagaggacgtggacgaccgcatcggcgacatcatctgccgcagcctgcgctttaaaaagagcatcgtggagcaggacgagaccgagcaggggatgcgcaaggcgctgaacttcggccataccatcggccacggcatcgaggccgtgaagggcatcaaaggacgccgcaccaccggcctgttccacggcgagtgcgtggcgctgggcatgctgcccatgatcgaatccaaggcgctgcaaaagcgggtgcgcggcgtgtaccgccgcttaggcctgcccacccgcaccgcctacgataaggaaaaggtgctggccgagatgctgcacgacaaaaaagcacaggacgggcagatcaccatcatcaaggtgcccggccttggctgctggcgcgccgagaccatccctgtggaggggctgcgcccgctgctgggcatggaggactgacccatgaaaaacacctttggcagcgacctttcgctgaccatcttcggcgagagccacggccgcgccgtgggtgcggtgctggacggcatggccgccggtgtgccggtggacgagagcttcctcgccgcctgcatggataagcgccgcgcccggggcgatggcctttccaccccccgggtggaagcagatgcggtgcagctgctttccggtgtggtgaacggccacaccaccggcaccgccattgccctgatgatcgaaaaccagaacacccgcagcggcgactacgccaagaccgccgaccttctgcgccccggccacgcggactttaccgcctacgccaagtaccacggctttcaggacgcccggggcggcgggcacttttccggccgggtgaccgctgctttggtggcgggcggcagcatcgtgcttgccgcattgcagcgggcgggcattgatatcaccacccacatcgcccggtgcgcggggctcgcagataccccctttgcactggacgaccccgccgcccttgcggcacaggtggagacgcttgccagtaagaccgagggctttgcggtgctggatgccgccgtggaagaacccatgaaagccgccatccgcgccgccggtgccgagggcgacagcgtgggcggcgtgctggaaactgccatcctcggtctgcccgccggcatcggcgagccctactttgacagcgtggaaagcgagatcgcccatctggccttttccatcccggcggtcaagggcatcgagttcggcaccggcttcggctttgccgggctgcgcggctcggaagcaaacgacgccttccgcatgacggcagagggcgcggtggtcaccgccaccaaccacaacgcaggcatcaacggcggcatcgccaacgggatgccggtggtgttccgcaccgccgtcaagcccactcccagcatctacaagcagcaggatacggtggattacatcgccaaaaaggacgcgcagctgtccattcaggggcggcacgacccctgcatcgtgccccgggccgccattgtgcagacctgcgccgccgcccttgcggtgggcgatctgctcaccgcccggtacggtgcccggtggatgaccgaccccaccggctaccggaaggaggcctgagatggaatacggactgatcggcggcaagctgggacactcctactccaagaccatccatgagctgctctgcgggtacagctacgagctgtgccccctgcccaccgaggcagatgcccgcgcctttttgcagcggcggcagttcaaggccatcaacgtgaccatcccctataaaaagctggtgatggagtactgctccttcatcgacccccgcgcccgcgccatcggtgcggtgaacacggtggtcaataaaaacggcctgctctacggctacaacaccgattatctgggctttgcccacctgtgcgaagcccacggcgtggaacttgcgggcaaaacggtgctcattttaggcaccggcggcacccacaacaccacccgcgcggtggcgctggacaaaggtgctgccaaggtgctgacggtcagccgcacccccgacccggaaaagggcgagctgagctacgccgaagccgtgcgcagcggcgcactggtggtgttcaacaccacccccgccgggatgtacccaaacgtgggcgtgtgcagtctggacgtggccgccatgcccgggctggaagccgtggtggacgtggtctataaccccaacaagaccgaactcattctccgcgccgaggacgccggtgtgccggtagccgtaggcgggctggagatgctggtggcacaggcggtgtatgccgccgaatacttccttggccgcaagttcgaggacgccccgggcgaggtgcggcgcattaccgctgcgctgcgccgcgagacgctgaatatcgcccttgtgggaatgccctcctgcggcaaatccacccttggccgcctgctggcaaagcagctgggcagaccgcttgtggatctggacgaggagatcgtcaaggcagacggacgcagcatcccggatatctttgccgccgagggcgaagaaggcttccgggcaaaggaagccgcgcagatcgcccgtttcggcaaggaaaaaggacttgtgctctcctgcggcggcggcgcggtgaagcgggcagagaatgtccgcgccctgcgccagaacggcgtggtgctgttcatcgaccggccggtggaagcgctggctgtgggcggcgaccgtccgctttcttccagcgccgaggcgctgcgcaccatggaagcccagcgccgcccgctgtaccttgccgccgcagatgcggtgatttctaacaccggcacgctggccgaggcgctggcagctgcacaggaggcactggatgaaatttttgattcttaacgggccaaacatcaatctggcgcgctggtctgagccaggcgtgccgggcgaagtggactataccggcctgatggactatgtgcaggcgggctgcgaccagcttggcattgaaacggatatctgtcagtccaaccacgagggcgatttgatcgacgagatccagtctgcccccgggcgggtagacggcatcgtgcttaaccccggcggctacgcccattacagcgtggccattctggacgcgctgcggctgtgcagcgtgcccgccgtagaggtgatgctggacgccccggacgagcgcgagcccttccgcaaaacggacgtggtgtcctttggctgtcaggggcattttatcggcgaaggcccgcagggctatctacacgcctgcatctggctggcgcagctgctgcgcaccgacggctccagtaaggcacatatcgtgatgtaaaacgagctcgccctctccgtcatcgctacgcgatgccacctctcccaaagggagaggcaagagcactgccggaagctttcttattggtcctaatacttcagcaacgagccttagaccttggctctccctttgggagagctggcgcgggagcgcctgagagggcgtgcccgttacagtaaaggaagtcgttcatgaaacacgccacagtcaacaaaaattataaaatgcttggcactgcacgcgctctgcgccgcacatctactgcgcaagagcgaaagctttggtatctgtttctgcgcgattatcctgtaaaaatctacaagcagcggatcattgagtcctttgtcgttgacttttactgtgcacaggcacggcttgtgatcgagctggacggttcccaacactataccgagcagggcaaggcttacgatgcagaacgaagtgcggttcttgaacagtatggactgctggttctccgttttgcaaataacgatgtggacaaccattttaatgccgtctgtacacagatagacaataccattcaaagcagacttcaatcttaaaaacaggaaaggaacgacctcccatgatcatctccaccaaaaaaggcactcccaaagaggagctggaaaagatcgttgacaaattcgaaaatcagggtctggacgtgaccctgatcaccggcaaggattacaacgtgttcggtctggtgggcgacaccaccaagatcgacgagcgggacgtgctggcaaacccgtggatcgacaacgttacccgcgtgtctgcgccctataagcgcgcaaaccgcctgttccaccccgcagactcggtcatcgattgcggcggcgtgaagatcggcagcaaggaaaaaatcgccgtcatggcaggcccgtgcagcatcgaaaacgccgagcaggccctgcgcatcgcgcagggggtcaaggcgggcggcgcagcgctgttccgcggcggcgcctacaagccccgtacctctccctatgcctttcagggtcttgagaccgagggcatcttagacatggtaaaggctcgcgaagccaccggcctgcccatcgtctccgagctgatgagcgaggaccgcatcccggagtttgaggagtatgtggacgtggtgcagatcggcgcacgcaatatgcagaacttccagctgctcaaggccgtcggcaaaatgcacaagcccgtgctgctcaagcgcggtctgtgcaacaccatcgaggagtggatcatgagcgccgagtacatcatggctggcggcaacgagcaggtcatcttctgcgagcgcggcatccgcacctttgaaaagtacacccgcaatacgctggatctttccgctgtacccatcatccacgaaaagacccatctgcccatcgtggtagaccccagccacgccaccggcaaggccaatctggtggagccgatgatgatcgccgctgtggctgccggtgcggacggtctggaggtagaggtgcactacgacccccagcacgcatggagcgacggcgcacagtgcctgaccccggacgcctttgcacaggccatggcaaagtgccgtcaggtggcttgggccatcggccgggagatgtaaaccgtttaccccctcaggcgctggcgcgccagctcccccaaggggacgcctgaagcgctgcccgggggaaatcttcaaaaggataacaccgctatgcttgtaaccatcagacctgcccccggcggcatcgggggcgtgatcgccgcgccgcccagcaaaagcatggcgcaccgcgccgtgctgtgcgccgcgctggctgtggggcgctctcacatcacccatctggaattcagcaaggacatctctgccaccctgtccgctgccgcacagctgtgcgccgctgtgggcaccggcgcagacgatgccactgtgcaggggcttgggcatttcctgcccctgaccgccccggtggactgctgcgaaagcggcagcaccctgcggtttttgatccccattgccagcctgaccggccagccggtcacctttaccgggcgcggacggctgatggagcgcccgcaatgcgtatacgaaacgttatatcgtgagcagaatctacggtttgagcagtccctctccgggctgaccgtggagggtgcactgacccccggggactaccggctggcaggcaacgtgtccagccagttcatcagcgggctgctgttcgcgctgcctttgctgcccggggacagccagctgcaccttattccccccgtggagagccgcagctacatcgacatgacccgcgccgtacaggccgcctttggggtgcacagccgctggctggacgaaaccaccctgctgctgcccggcgggcagcagtaccacccctgcgactacaacgtggagggcgattacagtcaggccgctttcccggcagtgctgggcgcagtgtgcggcggggtgaccatcaccggccttgcgccggacactttgcagggcgatgctgccattctggacatcctgcgccggtgcggcgcggtgttcacccgcaaaggcgacagcgtcacctttgaaaaagcacccctgcacggggtggatatcgaccttgcggattgccccgaccttggccccgtgctgatggtgctgggtctgctgtgcgagggcaccaccttcatccgcaacgccgagcggttgcggatgaaggagagcgaccgcatcgcggccatggaggccgagctgcgcgcctgcggcggtgtgctggaaagcgacggcggcaccatcacggtgcacggctgtgccgagcgtctgcacgcccccgccgcgcccctgcacggccacaacgaccaccgggtggtcatgagccttgcggtgctggctgctgccgccgcactgcccctgaccgtggacgatgccgaagccatccagaagagctggcccggcttttttgcagatgcagcgccgcttggcgtggaggtagaagatgcttgataaaacaaaacgttatctcgtagtgggtctgggtctgctgggcggcaagtacgcgctggagctgacccgcgcaggcttccatgtggacggcatcaaccgcagcgagggacatttgcagtacgcgctggagcacggctatatcgccggcggtaagacccacgattttgaggatcttgtccggcaggccgaccatatcatctttggcctgtaccccaccgcgctgctggactggtttggcacctacggccatctgctcaaacccgggtgtatctttacggatgtttccggcgtcaagaccggccttgtggagccggtgcaggcgctgtgcccggcgggggtagagttcattgccagccaccccatggcaggccgcgaaacctccagcgtggagcacgccgccgaggtgaattttgccccggcaaacttcatcatcacccccaccgaaaagaacaccccggcgggcatccagtgggcaagggagcttgccgaggtgctgggtttcaagcatatctgcaccctgaccgtgcaggagcacgaccggatgatcggctatgtcagccagctgtgccacgccattgccgtaagcctgatgtgcgccaacgacaactcctcgctgtgcgagtacaccggcgactccttccgcgacctgacccgcattgcacgcatcaacgacaaaatgtgggcagagctgtttttgtggaacaagcagaacctgatcagcgagatcgaccagttcgattctgctttgcaggagatgcgcgccgcccttgtggcggacgaccgggacaagctggaacagatgttccgcctttccacccagcgccgcgccgcctttgacaaaaagctgccggaataaaccgtgacggaggtattgccccatgcccaagcaggaaggacagaaatccaagctggtaacactgctgcgcatccttgagcagcgcaccgacgagaaccaccgcctgaacgtgccccagctggtgcagctgctggaaaatcagggcattctggccgagcgcaagagcatttacagcgacatcgacaccctgcgcagtctgggctacgacatccagctgcagcgggggcgcggcggcgggtactggatggccagccgtgcgttcgagctttcggagctgaagctgctggtggatgcggtacagtccagcagtgtcatctcggcgcgcaccagcaagcgcatcatccacaagctggaagccctctgctccgactacgagggcacccaattgcagcgtcaggtgtatgtggacggacgccccaagaccgacagccagacccttctgtacagcatcgatgcgctgcacactgccatcaaccgggggtgtctggtgcagttccgctacaagggcagcagcgccgtgcgcaccgtaagcccgtggcagctggcatgggaaaacggctgctattacctgatcgcctatcaggacgaaaaagcacccccggtgcgccactaccgggtggaccggatggccggggtgctggtgctggacgagccgcgccggggcaaagagttcttccgcaccttcgatttgcccgcctatctgcgcaagcacttcaacatgttcggcggcaccgagtaccgggtcactctgcggtgtgctgccgaccttgagccggtcatgcgggagcgctttggccgggagccggtgttctgcccggaggacgcagagcacttccactttgatgtgcccatctgcgtcagccagcagtttttcggctgggtgtgcggctttggcggcaaggtagaggtcaccgcccccgccgccgtccgcgcccagctgcacgagatggtgcaggggcttgcggaacagcatgaataaataaaaaagggttccagaaacgcctgcgggcgtttctggaaccctttttcctatcaatttttccttattcctcaaattccaggtcgctgggctggatgaggtcaagctctgcggcgggctcggcgatgaggcggcggctctggttgaaaatggccttttccagcgtgttgcgcgccagacggccattgccggcggtgcggctgtccagcgcctgacggcgcttatagtagcccagcagcgggaaggtgcagccctcggcaaggcggtagcccttgccctttgccagcacggcggtgatgtccagcagctcgtctgcggtgtagtccgggaactcgatcttgttggggaaacggctggcaaggccgctgttggcggttaggaatacctccatctccttggtgtagcccgcaaggatgaccaccagctcgtcccggtgatcctccatgccctttacaagagtgtcgatggcttccagcccaaagctgtcctgctggccgcggtacaggctgtacgcctcgtcaatgaacaaaacgccccccagtgcgctctcgatgacgctgttggtcagcggggcggtgtggccggtgtagcgccccacaaggtcagcgcgggtcacctccaccagctgcccgccccccagcgcgccgatggccttgaggtactttgccaccagccgggcaatggtggtcttgccggtgccggggttgccggtaaagatcatgtgcatggacaggcttgcggtcttgaagcccgccgctgcgcggcgctgctgcacctgtaaattgtctgccagaccgaacacatactccttgaccggggcaagccccaccagcgcatccagctcggcgcggatctgctccaccgcgccggtgtaggccgccggcagcaggctgaacaggtctgccggggcggcaccgttcagcgcaaattgcagcccctcgggcgcggcggtcagcgccaccgtgccggacagttttgcatcggtctgtaagcagtactcgctcagggcgcggaagatccgctcgcagcagtctgccagcccctctgcgcccttttccttggagcactgcgccgccacatagtcccgcacctctgccccagcggtaagggtcaggccaaggcggctgttcacccgctgcgccagcgcgttcagctgctgcgccgccagcgccgccaatgcttccggggtaaagggggcggtctgacacacatcccctaccgccgccacaaaggacgcgccaaatttatctgccagcgcctcccgtcccttgcgggagaagaagatcaggtacttgccgcaggggtcgatgcggctcactgcgccgggggcaagcgctgtaccagcttccaccagaatgccctctttgttcaccagataccggctggacaatggcgcgctgcccttgaccgcaaggtcggagaggatgcgcaaaaagccggggtggcagctctcgtagtgctcgaacaccacgatctcgcccggggcgtgcagggcggcgtataggtcctgcaaaaacagcttttccgcgccggggtcggggtagagcgccaagtccatcaccgccatccggtcgctctgcaaaagcccccgcgccgccatgatgcgggcggtctcggccagtgcaaagtgccgtcctgtgcccggagcaccccacagcaggatcacgttgcgggcggctgcgccctcggtgcccagcacaaaggggcggcgcatggcccgcaccacgctgtctacaaaggcatcctgcccgaggacggtcttttttacctcggcggcaaggccttcaaagctgcccagctgctccggctttgtgtctgccgtgcccttggccagcaggccgtccgcttccatatcccgcagcatccggcggctgtcctccagcgccgtctgcaccccggcatcctgcgccttcagccgggcgttctgctgcttcagcaattcgtccagctgcttttgctgttccagcagcgccgcgttcaggtccggcaggccgctgcccgccggtttttcgggctgcggcttttccggctgcggctgcgcgccgccgaacttcagtttgccgcccgcgccgaacacgccgttcatcaagctttcccaatcatcggtgtatgccatggtgctgccctccatcggtgttttttcttccagtatagtgaactgcgcggcattttgcaagcacaaaaaagctccccctttcgggggagctgattcccgcgcctatgcggggatcatgctgttttctcagcccttgcagccctgctcttcccagtcgccgaaatcgttggcatcggcgatcttggtgacgtcgatcttgccgttctcatccttgggggcaacggcgggaccggcctctacggggttggcgttcggagcttcagggtcgtacacagggcgctcttcggcggtctccggctgggtctggggtgcgttctcagcaggggcgggagcctccggtgcggcttcctcggcagcttctgcggcggcatcggcagcctttgcctcttccttggcctcggcctcttcgtaggcttcggcggtcttttcggcctcctcggcgtccttttcggcgtcctccgggaactcgaccgcctccacatggagcgggtctttctggttcaggatcttgtccagcaccacgatggcagcgccggtgacggccacggcagcagccgtgccaagaatacggaacagagttttcataccagaacctccttgtaatacagaaacgttaagagaacgttacgacctcttccaaaggcttttcggcgggctctaccgacacggcggtcagcaccgggcctttgccccggtagatgttgtggaacttgtaccccaccttggcggtcacccgcacccaagcgcgctgttccagcgccttgtagccatcgtagctgcaggggaagcccacaaactggatgtcctgcacgcagcaggtcatggcaaagcggccgggcacaaagctgtttttgccggcgcggttggtctggcagacctgtgccagaaaacgcaccgtcttgccggtgtacttctggggctcgtcctgacaatccatgtaccagatgccgaaatcgtcatccgggatgtcgatggggtcggcgttgatatcaaagggcagcgggtcggggatatcatcgtaggctacgctgccgtccttgaactcgtaggcgatatcgcacttgcgggaggcctgccgcaccagcttgtgcagctcctgccgggcgtcatcgttgttcacagcttcggcgcggttgaatacgatcagctcgctgcgggcgatcttgtccagcatcaggctgcgcatggagttgtcgcgggcgtaggtcagggcggtggtgccgtctgcagtggcgatgcactggtacaccagccagttctcgggcagggcatccgctaaatcctgcagcagccacatgccgttgtactcgatgaccacgcggcctgcgtccgcttccttgcccagctttgcaaggttctgggggttcagctcggacttgtcctccagcaccttcacggtcacgccggggaaggcgaactttttctcgttgtactcctcttcgccctcctcgcagatcagcagcagggtcttgtcgccggagtcgaaattggggtcttcaaaggtctcctgaataaactttgtcttgccgctttccagaaagcccacaaacaggtagaccgggatctcttttgccataataaatggttgctccttctctcaataatggggttctcagcagccgaacagctgggcgatggcggtctcgttcagtttggagccgatgaccaccagcttgccgcccacgtctgcactgcggctgcgcacttcccactcgccgggcacatagtcgaactccagccagccgtctgcgccgccgtccacgatgcccttgctgcgcaggatcatgccgtaattgccggtatccagctcggtgagggcgtgctccacctcagccttggtgaacttgcgggccgtctccacgccccagctggtgaacacttcatcggcgtggtggtcgtgatgatgatggctgcagcagcaatgaccgtcatggtcgtggtgatgctcgtgctcctcgtggtcgtggtcatgctcgtcatgatcatggtgatgatgctcatgctcgtgctcgtcctcatcatcgtcatgatcgtggtagtgaccgcagcagcaatggtcatcatgatcgtgctcgtcgtggtcgtggtgatgatgctcgtgctcatcctcgtcgtcatcatggtcatgatgatggccgcagctgcacacaccgttctcatcgtagtgatgatggtgatgctcgtgctcttcttcctcgtcctcgtgggcgtgctcctcgttggccttggcagccatggcgatcagctcggccttgaagtcgtccttggtggacatggccttcaggatctgctcaccggtcaggtgatcccatgcggtggtcacgatagtggcggtggggttcttttcgcgcagcattgccacggcggcggcgatcttttcctcgctggcggtctgggtgcggctgagcaggatgcagcttgcgtggctgatctggtcatcgtagaactcgccgaagttcttcatatacatcttgaccttgttcacatcggccacggtgacaaagctgttcagctgcacgtccagatgctccgccacgccctccacggcgcgggtcacatcgctcagcttgccaacgcccgagggctcgatgacgatgcggtcggggtggtactgctccaccacctgctgcagagcggtgcggaaatcgcccaccagagagcagcagatgcagccggcgttcagctcgttgatctggatgccgctttccttcagaaagccgccgtcaatgccgatctcgccgaactcgttctcgatcagcaccacctgctggcctgcaaaggcctcggtgatcagctttttgatcagagtggttttgccggcgccaaggaagccggagaagatatcgattttagtcatgatccaaatgcctctttctttttatcgcaatattcgcaattgttagcgcaaagggccgcagagtgctgacccaaaaatactacacctctattataacaaggctgtcaatggaaaaccggcctttttcaagaaaaaattgtaactttttttgcaaattgacggcgttttggggggagttttgcccccgcattgcattctttcccgcagaatgatacaatagcagcagcaaaccatcgccgccggacgtttttccggcaaatgacagaaagagggcttttgttatgagtatgaacacagttcccgagcgtctggccgcgctgcgtgccgctatgaaggcaaacggcgtggacgtctatctgatcccggtgggcgatccgcattccagcgagtatctgcccgaccactacacctctctgacctacttctccggcttccacggtgagaactccaactttgtggtcaccatgaccgagagtgcagtctgggcagacggccggtactttgtgcaggcagagaaggagatcgccggtaccgagatccagctgatgcgcatgggcgagccgggcgtgcccaccgccgaggaatactgcggcaaggtgctgcccgagggcggcacgctgggtctgtgcggcctgaccgccaactgtgcactggtcaacaacctgaaaaaagagctggagcccaagcacggcagcatcaagaccctgttcttggaggacgagctgtgggtggagggccgtcctgcccgcccggctaccccggcatggatcctgcccaaggaatacgcaggcttctccccggcggaaaagctggagcagctgcgcggcaagctgaaggagcagggctgcaccgcccagctggtaggcaagctggataatctggcatggcttctgaacctgcgcgccatggatatcgagtgcaccccctacgccatggcctactgctatgttaccccgaatcgcgccgtgctgttcatcgatcaggcgcgggtcaccccggaggctacggcagagctggaagccaacggcgtaacgctggccgactacgacagcattctggacgggatggccgccgagactgagccgcagaccgtgctggcagagagcgctaccgtgaactacgccgtgtatcaggtgctggaaaacaaccccgccctgaccgtgaaggacgccgccgaccccctgctggccatgaagggcgtgaagaacgaggtagagctggcacacctgcgcgagtcccatctgcgggacgccgtggctatggtgcggttccagatcgaactggagagccgtctggcttccggcgaacagctgaccgagctgaccgtggacgagatcctgcacaagtaccgcagcgcagacgataagttccttgtggaaagctttggcaccattgcagcctacggcggcaacgcagccatgatgcactaccacgccaccccggaggatcacgccgttctgcagcgcaagggctttttgctggtggacagcggcgctacctatctggacggcaccactgacatcacccgtacctatccgctgggcgagctgaccgaggacgagcggctgttctatacttggacgctgcagtgccacatcgacatcgccaaggccgtctggctggattactgcgactgccatatgctggacaccatcgcccgcgagccgctgtggcgtcaccttatcaactaccgctgcggcaccggccacagcgtcagctttgtgggcaacgtccatgagggtccccacgctttgaacgggcgcaacaccaccctgatgcgcccgggcatgatcgtcaccgacgagcccggcgtgtatgaagccggcgaggtgggcatccgcatcgagaacgagatcgagtgctaccacaaggccgacaaccagtacggtaccttccttgccttccgtcccctcacctttgtgcccatcgctacctctcccatcgtgcccggcgtgctggacaaggagcaggtcgcctggctgaacgattatcaccgcaaggtattcgagcagctggcaccccgcctgaccgaggacgagcgcgcatggctggccgagaagtgcgccgccatcggctgctaatgctaaaaagaacaaaagtcagctgccgcttgccgtcctgactcttgccgtaaaaatgcaattccgggcagaccgcagtctgcccggaattgcttgatttaagatgatttttccgctgatgatggccagagcaacgcggaggccatttcaaatcgtctaccctgcaaaggaaaccaaaccatgatctttcacattgcgatctgcagcccggacggggcgctgcgcagccggctggagcaccagtgcatggagttcttcgcccggcgggaggacgcctgcatcgtggagcagctgcaaagcccggaagcgcttttgcagcaggatgccgccgggctgcggtacgagctgtacctcatcgagcttgcggcggtagcccggcccgaggggcttacggcggcggcagagctgcgccgccggggccgccgcgcgccgctggcttttgtggcacgcaccccggcgcacgcatacagcgcctaccgggtggacgccatgcagtatctgctgcagccggtgcaccagccggaggtctcggccctgctcaagcgggcggtggagccggaatacggccccacccttaccgtgaccaccgccgacggtgtgcgggcgctggcctatgccgagatcgaatatctggaatgcacccatcatatcgtgcacttccacctgaccaccggggaggatgtagcctccctctcgctgcgggtgcccttttctgcggtggcgcagccgctgcttgcggacggccgctttgtgcagccgcaccgctcctatgtggtcaatctggaagcagtgcagctgctggcacccggcgaggtacggatgcgcagcggggcgcgcatccccatcccccgcgggcgggaagccgccgtccgggaggctttctgcgcccgggtagggtaaaaagtaaaaagtcgctgcacattcgtgcagcgacttttttgcttaacgatttattcttccttatgccggggctttttgcggcgggcgtgcttttggggcttgcggcggggctttttgcgggagggctcgggctggacagaggcatcgttcaggcgggacattgcatccagcaaagcaccctgcaggctgtccgagggtaccccgctctccgaaaaggcgaacaggaatttgtagatctggggctgcagctcctcgtacagtccaaggcgggtgtacacctccttgaacagctgaaaaatctgtgtcttgttctctacgatgccgcgcaggtcgatctgggtatggcagaggcttttggggttctggatataatgatacccggcctcggggatggaaacgaacacctccgcatgttcaagataccccatgttgaagatcagatcctcggcccagtgcacatcgggcgcaaaggcaagctgattttgcgcaatgatctcccggcggtagagcttgttccacagcacaccgtagtaaaaggatgcaggctgctgcatcaggctgcgggcgtagtcctcccggctgtaaatgccctccggcagaaagctatatttgcgcacctcagttttcggcgtttccggttcgatgcccagcgaagtttgcagtgtctcgaggaagtaaccagtcttggtggaatttgaaggaatcaccatccagtatggggcgattacaaggtctgcgctgtgctgcaaagcagcctgcacaaggttctgggtgtaatcgggatccagtgcgtcatcactgtccgcaaactggatatagtcgccgtgtgcaaggacaagcccggcattccgcgtgcaggaaacgccctcgttttccttgtccaccaccacgatgcgtggatcctttgcccggaactgctcacaaatggcaaggctgtcatccgtagagccatcgttcagcacgatgatctccagttcctgataggtctggccgcaaatactttccagacagcgggaaagccccttctgggcgttgtacacgggcacaatgatgctgacgagagggttcgtcatggcagggcctccttttttgacgacaaaatttgagtattattattatcatactcctgcggcacccggattacaagagcgccgcactgtggcagttttgtgaaaccttacgcctgcgcccagtccagtgcagtccagtccggcaggaactggtcgcagatgcggcgcaaagcgggggcgtcggcggcgctggtggtgtcctgaatgcccaccagatagaagccggcgtcatgggcggtctgggcagcgtagagcgcgtcctcgcacacggcacacccggcagggcttgtgccgccaaggcggtgcagcgcttccataaagggagcggggctgctcttgctcatagcaccccgcgcctcaatgtaaaaatcaaagtattcgtcgatgccaaggcgggtcagaacggtgcggcactggctgctccatgtgttggagcaaacgcacatccgtgcgccctcggcccgcagccgggcaagggtgtcccgcacgccgggcttcagttccaccttctcgtacaattgggcgatcacctcgcgcatcacgtccagatagccgttcctgtccagcggcagcgcatattcccggatgaggtactgtgcgccgtcctccatgcccatggtcagcagggtctcgtgcaggtctgccttcggggtgcggccaaagcgtgccagcagcgcctccggggcgccctcccataccaccaccatgctgtcggtcagggtgccgtccatatcaaagatccattgtttgcagtgcatacgttcctcctgttgtgcgccctccgggccgcttttatactcatctccggttagtatagcacgaaactttcacaggaaaaaggcatgatctccgaaaaatcgggagaattttacctgaaagtatggtataattataacaattttagaaaataccgggaacgtgcacgggagggcttgatatggaacgcagagaacccacgcaaaaggcgctggtgctggcaggcggcggtgcgcgcggcagctatcaggtaggcgtctggcgggctttgatggagctggactggcacccgcagatcattaccggcaccagcgtgggcgggctgaacggcgccatgttcgtgttggacctgtacgagaccgcccgggatatgtggctgaccatccgcagtcgggatgtgatggagctgccgaaggaaaacgcagacctttccgccctgcaccagtttctgcgccgggtggtaaaggaaggcggcatggatgtgaccccgctggaggagatcgtggagcgtgtgctggacgaggacgcgctgcgggcagcgcccatccggttcggcctcgtgacggtggagcagcgcgggctgcgtccccgggagctgacgctggaggatatccctgccgggcaggtgcgggactacctgatggcttcggcagcctgcttccccgcattgcgggcgcggcagatcgatggggtaaagtttctggacggcgggtacagcgataatatgcccaccggccttgccaagaccatgggcgcagaggagctggtctgtgtggatctggaaggtgtgggcatcacccgccccaacctgaccggcctgcccaccaccatgatccgcagctactgggagctgggcgatatcctgcacttcgaccccgacaccgccaagcgcaacatggagctgggctactacgacaccctgcgcgcctttggacgcatccggggctgtgcctacgcggtggacagcggtgcggacagcagcgccgatgccgaagccttccgcgcagcctttgacaccgtgcagaaggaggtgcgggagaagtatcctgtcaccctgaccgccgatgccgctttactgctggcacggatgaaggacgcccagcttgccccgctggaagccgccgccgaggacgccggggtagaccccacccatttctacaccacccggacgctggccgaggcgtttctggccgcgtgcgacaaagagcgtatggaaagctttgccccgctgttcacgggcagcagcaccgccgggcaggcggcgctggccgctttgctgcccaatacattcttacaggcgctggtgtggcgcactttgaccgcaccggctttgccggaggtgacagaagatgaaggtttataaaggcgtatccgcatcccccggactggtgctgggtcaggtgagccgactggaacatcatgtggagaccttcagccacggccctttcaacccggagcgggagctgcggctgctggcaaatgccgtgcacacggcgcagaatgaactggactccatggcagagcgcgccgcccccaccgagcaggccatctttttgttccagagcatgatgctggacgacgagggcatgatgaacgaggtgcgcttttgcatcaatgcgggcatcagcgcctcggcggcgatgcatcaggtgggacagcgctacgccgaccagcttgccaacatgaaggataacccctatatgcagttgcgcagcgtggatattctggacgccacccgccgggtgatcaatatcctgaccaaccgcccccgggtgtggctggcgctggatcatccggtgatccttgccgccgaccggctgatgcccaccgacctgttcagtgtgccctccggcatgatcttgggtgtcatcaccgccgagggcagcggccagagccatgccgccatcattgcccgggcaatgaacatcccgggcatcgtgcaggtgggcaaggattttctggacgactgcgacggccgcaccgtcattctggacgcaaccaacggcaactgcatcctggacccggacgccgccgcccgccagcaggcagaggccagcatctgccagctccagcgcgaggacgcggagatgaagcagctgcacagcctgccggacgaaacgcgggacggcgaaccctttgagctgctggccaactgcttcggcccggaggatatcgacaccgccatgcagtccggtgcaaagggcgtggggctgctgcgcagcggctacatgatgctgcccgggcgcattctggacgagcaggagcagtatttcttctactgctcctgtctggcagcggcaaacggctgcccggtgaccgtgcgcaccttcgactttggctccgaccgcaccgtggccgatgccaatcaggggccgcagtcctccaagctcggcctgcgcggcatccgcaacagcctgcgccagccccagcagttccagacccagatctgcgccttgctgcgcgccgctgcccgggggccgctgcgggtgatgttccccatggtgaccgatgtagaggactgggacgccgccatgagcatcgtggagcactgccgccagagcctgcgggagcggggcgtgccctttaacgagaacacccagttcggcgtgatgctgagcatccccgccgcctgcctgaccgtggaggactttgtagcccacggctgcgattttctggtcatcggcaccaacgacctgacccagtacacccacgccgccgaccgggagcttgccagcgcagagcactactaccgccccgccagcccggccatgaaaaagctgatcaccatggtgatggatgccgccaatgcgcaccacgtcccggtgactatctgcggccttgccgtgggcaaccccgccaacacggcgcagtacctgcacctcggtctgcgcagcttctcggtcagcccccagaacctgctcaaggtaaagcgagccctgctggacaccgatgcccacccggatgcaggggaaaatgcctgaaaatgcttttacaaaacgtaatatagcgcaaaataataagaggctgctgcacaaaactcctgtgcagcagcctctttcactctttttttgttatagctgtcgtttttctttacgacccccttccgtgaaaaagcaccccgggaaaatccgcagattttcccggggtgccaattttaaataattattccgctgaagatggtcagagcaaagcggagaccatttaaatcgtcaagcgtcttactccagattccccgtcagggtcatgacggcggagagcaccgccagcggggcggtctcgcaccggaggatgcgggggccaaggcccaccgtttttgccccggccttggcggccatttcggcttcctcggcggcaaagccgccctcggcgccggtcacgatggcaaggcgcagcttttgcccatcggcgggctttgcctccgtcagcagctggcgcaggggcgcgccgccgcactcgtagcagaacagcacaagatcgtactggtcaaagctgcggcacaccgccccaaagttcggcagcggcagggctacgtttggcagaacgccccggccgcactgcttggcggcttccagcgcaatgcggttgtagcgctcgttcttctgctcttcctttttgggtgcagccacgcagtagcggctgaagaagggtacgatgtgggcagcgcccagctccaccccgtgcttgatgatctgttccagcttgtcctgcttgggatagcccgccagcaaagtcacctccacggtgggctcggcggcgctgggatagcccggctctacggcaaagtctaccctgtcctccccaaagccggtaatggtggcggtgtactccacggcgttgccgtcgcagaggatgacggtatcccccggctttgcccgcatcacccgggcaaggtgatgggcgtccgcaccccgcagggtggcggtgccgttggaaatctcggtggtaaagtagcggtgcggcatactgtgcgctccttcttacaatatttgaatctcaggcctttttgcagacgatgcactcccagccgcgcttttccttgacttccacgacggacaggccggctttttccagcccggcgatcacttcgtccttgcggctgtcgatgatgccgctggcaataaaggtagcgccctcggccatcaggccgggcacagcgggggcaaggctgaggatggcgttggccacgatgttggcggtgatgatatcataggtgccgctggccttatcggatagatcacccaccagcacggtcagcttatcctgcacgccgttcagcgcagcattctccccggcggtacgcaccgccacggggtcgatgtccacaccctcggcgctggcagcgcccagcttgagggcggcaatggcaaggatgccgctgccggtgccgatatccagcacccgctcaccgccgcgcacctgctcgtccagcgcttcaaggcaaaggctggtggtctcgtgaccgccggtgccaaaggcaaggccggggtcaaggatcagctttacccggtcggtgtcgtactgctgccacgagggcaccacagccagacgtctgccgatctccatggggtggtaatatttgcgccagccgttctgccagtcctcctgctccacaccctcggtctccacggtgtaggggatgccggcggcttccatgcgggcggcgatgagcgccagcgtctccacctgagaagcacccggctccagatacagatggatgatcacggtatcccggggcttgtccagcagctcctgctcgatcaggtccacatgggcgatctcggccacctgctgctcgatgtcgctgtaatcctcgatgtagatgccgccctcggcgatcagggtggcaacggcttcggcgttttcggcatcagccttggccacggtcaggcggatatcggtccattccatagtacaagtctccttttatcctcgtccttccggcagcgccggagggaaaaattctgtcacctgtatagtacccgattctgcgcccggatgcaagcccctccggcaaaaccggcggcgctgccgcccgaaagggtgcacagattgactttcggcagaacatccgttatgctatatgggacaggacaaaaaatgtgatgctgcgcaaagcggcatcggaaagggatctttatcgtatgtgtaccaaaaccttcacatggcggctgctcaccggccaagagctgaccgaggtgtatctgaacgagatgcgccgggatttccccgccggggagctgaagcccctgagcatgatcctgaccagcgaagcggagggcaccgcccacacatggggcgtgtttgacggcgacacgctggcggcttatcttttgatggtgcggccggagggctgccgggtgagccagctggattattttgccgtagtgcccgcctaccgcgcccacggcatcggggcgcagctgctggcgcagctgcccgcccaggagggcgatgccgaagcgatccttattgaagccgaaatgccggaaaaggccgaggacgctgctatggccgtgcggcgtctgggcttttacgcccgctgcggcgcgtgggatacccactacaccgagcatctttttgacgcatggttccgcattctggtgctggactgcccgggctgctcctcccttgccccggagactgtggtagaggcactggccgactgctaccgccgcaccatcagccccacccagtggcaaaagcacgttcagttctttgccccggacggcagcgtgtgcgggtaaccaaaccatcagatgcgcagggcgcggaggaagcttccatgagtgaattttcacatctgaaaaacaagttgctggccgagcaggtggaggaccagatctaccattatattctggacgaagcgctggagccgggcgcaaagctgcccaacgagtttgcgctgggcgaaaagttccgggtggggcgcagcaccatccgcgaagcggtcaagctgctgtccagcaagggcatcgtggaagtgcggcagggctccggcacctatgtggtgaccacggtcaagggactttccgacccgctgaacctgcgcagcgtgcaggacaagaatgcgctggcttttgatctggtgaacgtccgtctgctgctggagccgggcattgcggagatggccgcgcagaacgccaccccggaggatattgagcggctgcggcggctctgcgagcgggtggagaccaagatccacgagggcgaccgctacatcgaggacgacattgccttccacacctgcatcgccgagagcagcaaaaatctggtggtggggcagctgatcccggtcatcgatacagcggtgatgatgttcgtgaacgtcacccacaaaaagctcatcgacgagaccatcatgacccaccgcatgatcaccgaagccattgccaaccacgaccccatcggcgcaaaagccgccatggtgatgcacctgaacttcaaccgcagctacatcaaaaaggtctacgatggcgaggacccggatgacggcaccatcggcatggcggcgtatgtcaattgatacacaaaactgattgaaaatgcgctccgctttgctctgcgcatagtcagcggaaaaatattttttatagagcaatgccggagcgtctgcggacgctccggcattgcattttcacgggtggggtcgtgaagggaagcggcagctgcagcgccgctttctacgaaagcgcggcgctgccggaaaggctttgactgagaggattcttcccaaaatcgtcagatgacttctttcccgtgttttttccaaaagccgctttgacggtcgattttgggcaaaattcgcccagatttgggcagagtgcatgatgtatcccagagtttttgcacaaaaagtaggacatacccgtgacaacttgcaaagagacgtctgcggatttacaataaaaccacaaaagggccaacagaaaaaggacgaaagcaagcagtatttggaggtaatgaatatggagttgcgttcacaggaagtccgcactttagcacccgagaacgacccgctgaagatgggtatgggctggaaggtcgaggaccttgcaaagccccagatcatggtggagagcaccttcggcgacagccatcccggcagcgcccatctggatcagttcgtcaaggaggccgtgcaggcggtcaacgataacggcggcaaggcggcccgctattttgccaccgatatgtgtgatggcattgcacagggtcatgacggcatcaactactcgctgccccaccgtgacgccatcgtcaatctggtggaggcacaggccaacgccagcgtctacgatggcggcgtgttcatcgccagctgcgacaaatctgtgcccgccatgctcatgagcatcggccgtttgaaggacatgagcgccatcgtggtcaccggcggcgtcatggaagcccacaccctgcccaaggagtatgtggtcagcgaccctgcctgtgccatcaacgagctgctgacgctggagcagatcggcaagtttgacgcatgggaaaagaccggcgtcatccccaacagccagctggattactacaagcacaacgcctgccccagctgcggtgcctgctccttcatgggtaccgcctccaccatgcagatcatggccgaggcactgggtctgatgctgccgggcaccgccctgatgcccgccaccgccccggagctgaagcaggccgcctacgatgccggcaagcagctgatggagctggtcaagaagggcatcaccgccaaggatatcgtgaccaagaagagctttgagaacgccatcatggtgcacgccgccatctccggctccaccaacgccaccatgcacctgcccgccatcgcgcatgagttcggcattgagatcgacgccgacacctttgaccggatgcaccgcggcgcacactacctgctgaacatccgtccctccggcgactggcccgcacagtacttctactacgcaggcggcgtgccccgggtgatggaggagatcaagtccatgctgcatctggacgtgatgaccgtcaccggcaagacgctgggcgagaatctggaggagctgaagaagaacggcttctaccagcactgcgatgccattctggccgaaaagactgccggttttgcccgtcctgtcagccgcgaggacatcatccacagctttgataacgccaagggcactgacggcagcatcgccatcctgaaaggcaatcttgccccggagggctgcgtcatcaagcacaccgcctgccccaagaatatgtttgaagccactctgcgcgccaagccctacgacagcgaggaggcgtgcatctccgctgtgctgcatggtgaggtgaagcccggtgacgccatcttcatccggtacgagggcccccgcggcagcggtatgcccgagatgttctacaccggcgaagccatctgcgccgacccgaagctggcttccagcgtagcgctgattaccgacggacgcttctccggcgcaagccgcggcccggtcatcggccatgtcagcccggaggctgcggtgggcggccccatcgcactggtggagcaggacgacctgatccagatcgatgtgcataaccgcaagctggccattgtgggcgtgaagggcgagcccaagacccccgaggagatggacgccatcctcgccgagcgccgcgccaactggaagcccaaggctcccaagtacaccaagggtctgctgaaactctactctcagcacgccgtcagccccatgaagggcgcatacatggagtaaaccgctccgcataaataacaaaaagtaaactgtccggtgcgttttgccggacggcttggataagtgcaaccaaaaatcacgaaacggaggaaatttctatgacagcagttgcaacgcccgatgcggcacggctggtttttgctgccgtggcaggcctgatcctattgctcattctcattatcaagttcaaggtacacgccatgatctccatcctgatcggtgcggtgggcatcggcctgatggccggtatgcccctgtccgacatcatcggctcggtgaacgagggcatcggcaacaccttaaagggcatcgcccttctggtgggtctgggctccatgttcggcgccattctggaagaatccggcggcgcacagaccttggctgtgaccatggtgcggaagttcggtgacgaaaaggccgcgtgggcactgggcatcacgggtctggtggtggccatgccggtgttctttgatgcaggacttatcattctcatcccgctggccttctctctggcaaagcgcaccaagcgctccgtgctgtactacgtcatccccctgctggccggtctggcggtcggccacgccttcatccctcccacgccgggccccgtgctggtggctaccatgctgggcgttgaccttggctgggtcatcctgattggcatcttctgcggcatctttgccatgatcgccgccggtcccatctggggcagcatctgcggcaaaaagtacatgatcgaagtccccgaacacgttgcgcagcaggcagacattgacgagagcaagctgcccaagttcggcaccatcgtgggcatcatcatgatcccgctgctgctcatcattgcaaactctgtggcaaaggtggtgcccgcactggcaggcatccagcccgttctggccttcctcggcgagcccttcatggcactgctgctggctaccatcgctgctatgtacctgctgggcacccgccacggctacactaacgcccagctggaaaagatcatgaccaagtctctggagcccaccggcatgatcctgctggtcactgcctgcggcggcgtgctgcgctacatgctgcagaactccggtctgggcgatgtcatcggcaacgccgtggcaaacgccagcctgccgctggtgctggtggccttcatcgtggctgctctggtgcgtatctcggtgggttccgctaccgtggctatgaccatggcagcaggcatcatctccgccatgcccggcctcagcgcgctgagcccgctgtacctcgcctgtgtcaccgctgccattgcaggcggttccaccgtctgctcccacttcaacgactccggcttctggctggtgaagagccttgtgggcatggacgaaaaaaccaccctcaagacctggaccatcatggaaacgctggtcggcggtgtgggcttcctggtagccctcatcatctccttctttgcctgagcgcctgtccggggcctgcaccccgggataagcgttgggagatatccttattcatttacctcgttacctccttcaaaaacagccgctccgggtgcgcccggagcggctgttttttgcgcctgcgtgacccggtcacggaaaagcgggctgcgtatggggtatactgatggtgtcagtaaacacaacacccattcaggagggaaaaaatatggcagtcatcaacattactaaggaaaactttgcacaggaagtgctccacagcgaaaagcccgtactgctggacttctgggccagctggtgcggcccctgccggatgctgagccccgtggtggacgaggtagccgaggagcgcaccgacgtgaaggtgggcaaggtgaacgtggacgagcagccggacttggcggcgcagtttggggtaatgagcatccctaccctgctggtgttcgagcagggcaagctggtgcgtcaggccgtgggcgcccgccccaaggccggtgtgctggagctgctgggctgaattatcgttttgaatgtggtacagcggagcgcctgcgggcgttccgctgtaccttttttcatggggaaggacacaaaggcaaacagcaaagcgcccgccctatagttcgagcagaaccacggggcgggcgcttattttatatggagttcagaagaaaaatgcgggattcagcttacagctgggggcctgcggagaccagagccttgccgtgctcgttgccctcgtacttggcgaagttcttcacgaagcggccggccagatcctttgccttctcttcccactgagcggcatctgcgtaggtgtcgcggggatcgaggatggcgggatcgacaccgggcagagcggtggggacctcaaagtcgaagtaggggatcttcttggtgggagcctcgttgatagcgccgctcaggatagcatcgatgatgccgcgggtatccttgatggagatgcgcttgccggtgccgttccagccggtgttgaccagataagcctttgcgccgctggccttcatcttcttgaccagctcctcagcgtacttggtggggtgcagctccaggaaggcctgaccgaagcaagcggagaaggtgggggtgggctcggtgatgccgcgctcggtgcctgccagctttgcggtaaagccggacaggaagtagtactgggtctgctccggggtcaggatagagaccgggggcagaacgccgaaggcgtcagcagacaggaagatcacgttctttgctgcgggagcagaagaaacgggacgcacgatgttctggatgtggttgatggggtaggacacacgggtgttctcagtgacagacttgtcagcgaagtcgatgtggccctcggcatccagagtgacgttctccagcagagcgttgcgcttgatggcgttgtagatatcgggctcggactccttatccaggttgatgaccttagcgtagcagccgccctcgaagttgaacacgccgttgtcgtcccagccgtgctcgtcatcgccgatcagcagacgcttgggatcggtggacagggtggtcttgccggtgccggacaggccgaagaagatggcggtgttctcgccgttcttgtcggtgttggcagagcagtgcatggaagcaatgcccttcagcggcaggaagtagttcatcatggagaacatacccttcttcatctcgccgccgtaccaggtgttgacgatgacctgctccttgctggtgatgttgaacagcacagcagtctcggagttcaggcccagctccttgtagttctcgaccttagccttggaagcgttgtaaacaacgaaatcaggctcgaagttctccagctcctcagcggtgggacggatgaacatattggtaacgaagtgtgcctgccaggccacttccacgatgaaacgcactgccatgcgggtatccttgttggcgccgcagaaagcatccacgacgtacaggcgcttgttggacagctccttctgagcgatctccttgacagccttccaagcctcctgggaagcggggtggttgtcgttcttgtactcatcgctggtccaccacacggtgtccttggagttctcgtccatcacgatgaacttgtccttgggagaacggccggtgtagatgccggtcatcacgttcacagcacccagctcgctgacctgacccttctcgtagccttccagctcgggattggtctcctctgcgaacagctgctcgtaggaggggttgtgcacgacttcagtcgtgccggtgatgccatacttggtaagatccaactttgccatatttgcgtacctctactttcgtttgatccttacataactctgtgtaggagatgcagcgccatttatggtacggacaccgcataagggggagacagcacagaacgatgcagtgcaaattctcctgtctatcattatacacaaaagctttccaaaagcaataaatggaaggttctgtttgcaaaaaagaaacaaatttcataaacaagctttcccacattaagtaaattcacgaagccctgcagggatgcagactgtgaaaaataaggcgggatggggaaaaaccgacattttgataaaagcttgacaaaccgggatgcaaggtgggacccccggccccggtggggcaaaaaaacacagcagacagctctttggtgcaagaccgagaaaatgtaaatgagcacaaaaaaacaagatgatagttgaaaaaataaagcggtatgatacaataaagctagagaggactctccgagaaacagaaaccaacataccgaaagagaggaagtgcttttctatgaaaaagatcgccccgatcctgctggccatggttttggccctgaccctttgcctggtaggctttgcggatgcagaaagctatgacgatgatccattggaagaaacagcggcttccacgtccgaggaggccttggaggaggcagagccggttcctgccaggagcagtgagtgcgacgcttgtgggaaaatgtctcgcgtaaccccaaaaaaagacacgtttgagaccggaccggaggaagtaaaatgcatccattatccccacgggacggacgaagtctattatcagcatactacgtattaccaggtctgcggttcctgcggatacaagtccggcacatggactgtggacgagggagagtcgctccggtactgccacgggtggtcggcgacaaagcactgagttccggggagagcgatttttgtacggctaaatggagaggcccctgtagcagggtgccgctgaccgtttcaagaacttgtgagaaacagcagcccagagccctgaaaacagctttgggctgctgtttttgcccttttttgcaatattttggccagaagaaacgttttagtggtgaagggaccttacttatgctatactggttctgtatatagatgatacttttccccctttgccgggggctgacataagggaaactgccatgaaaaccatctacattctgctcacccgctccggcacgctgctgtccaaactggtctatgccgccaccggtgccagctatacccacgcctccatggcctttgatccagagctgagttgcctgtacagctccacccgcaaaaacggctacaccatgttcccggcaggccccagcaaagaatatctgaacaggggcgttttccgtctgcgggacaacgccccctgtgcgctgtacgcgctggaggtgtccgacgaggcctattcccacgcactgtgccgcgccgaggagttcatgcgccacagcgaggagtacagtttcaacacgctggggctgatcttgtgcgggctgcatatccgctggcagcgccgccggcattatttctgctcccagtttgtcagcgaggtgttggagcaaagcggcgctttggcgctgcccaaggacggcaccctgatgcaccccaatgactaccccctgctgccccagctgaagtgcctgtacaagggacgcttagccgacctgccccagcgcaaggccatggatctgggcgagacgccctcgatggtcagcatctataccggcctgctggtggagctgctgcagcgccgggcgcaaaggttttttgagtgattttttgtataaagccgaatttttcgcttttttaggtgtcgctcttgctttttgcagccaattgtggtaatattattcggcggtattgttttgccgcagaatatgcgctcgtagctcagccggtagagcatctgacttttaatcagagggccagggattcgagttccctcgagcgcaccaaaatcccacgaagaatcgtaagattcctcgtgggattttctttttatacgccatttgcacggtctctgcacggtttttgcacggtccgcatttttcgtgtcagatggagtaagtctgtgaattactctgcaattcgtgctattttttgcaattcaggtcagcaaagccaagcggagctgcgcttttacagaggggtctgcgtctttcagaagctccaacagtgccgacacggagatggtcggctctgcttcaaccggggcagcctgcacaggtgttgttcccgacttgtagaagccttcctcgaactttttacccagctttttacgggaatcctgctggatgtgtgcataagtgttgaccagcaaattggcgctggcatggcccgttgtgccctgtaccgctttcacatcgccgccggagatcatcagctggtaggtggcactggaatgccgcaggccatggaacacgatgcgggtgaactccgggtgttcgtcctgccacttgatgaacttcttgcggatgaggatcggctctaccgccaaaccgttgggcaggcgcaggagcatcccactgttgcggtagcgttccggctcaacggcttcgtccatttccaaacgctttagccagtgcttcaattcctctttcagcacggctgtcatgaaaatggttcggttggaagatgctgttttggtctttttgagcactagcgttgtggtactgccctcacgcttatcttcaaattcctgcaagatgcagcccttgcctgtttttgccagcgatgccttctggacacgctgcatacacttgttgatgcggaaagtgcctgtaccgtctgctccctcaaaatcaagatcttccggggtcaggccagcgactttgccctctcgcagcgcgcccaccagcgtaagatggactgccagatgcagaatcgggtcctccatgctggcaagtgcggcccacatctcgtccgcgccccagatggcgcgctcctgaatcgatttcttggggctgtccaccggaacggggcttttggcgaggatgccccactccaccgcatactggaacgctgtccgcagcaggcggtgtacctcgtggatggtcgtgccggagagaagccgctgctgttgtttttctgaaagcacctgctttttgccctcataatactggccgcagggcgttttgctgagggtagaatacaggtcttccagatggtaggtttgagcttttgcatctgcatatcgccgatgtacgggatgataagattctggacggttcccagattggattgataggtgcagggtgcccatttgtgcttgttgcattgcttgggaagccactccatcaaaaactctttgacggtgatggtggacggaatcagaaacattccgtttgcaagttcgtgttcgatttgttttttacggtttattgcctcctctttcgtggaaaaactttcccatttgttgcagtttttaccctgctcgtcttggtaagtatagcggacaccataggagctgccgcgtttcgtaatatatgccatacgttatctcctttttcaagctgcccggagccacgcatcgaaactgtctttcgggatgcggatgcttccgcctacccgcagaacacggaattcggtggtgctgttgcacaggttgtaggcagaacgcaggctgatggacagcatctgtgcgatctcttccaccgtgtacaccagtgttgtggctttcaggctgtcagtcggagacttgacggcattggtttgagtgaccacttccattgtatcgttattcggaatggtctgcaagatatttttcgtataatccaaagatttcacagtttcggtcattgctgccctccttttgtcaggtgcatattcgtttagtgaatcagccgatcaacgatttcatggattccaactttttctgtgcgttctctttgcgaagacttgccccgatgcaggaaattggaacgcacatttccagaatgcggtcataaatgcgggcgtgagcagtatcctgtggataccgtatctcgttcagcggcaggttggtggtgacgatcagcggtttttggctgcggtatctgctagggcttaattgagcgtccagcaaaaactttggaaatggcagataccggggtagcggagtacaaacggtcaaatcatcaaacaagccaatcaccctccctgtctctgctattccagcattttcaggtgcctcgagcggataaattccagatagcgctgcagattgtcagaatacttttcaatttgcttccagttttccggccctgtcagaagatctgggtactctcgaaacgtgagttcccaattctcgataaaggcgtcataagcaccttcaatcgcagcgatgtggatggaatgatccgcagatgcttcaacagattttttcagggctttttgatcactattggtcagtgcccttttgtgcccttgtactttttttgaaatgccgatcagaaatcgacttccgtcatcatcaaaagattcgaccttcacggaagggctttttgtagaggaagcaagctgcttatctcgctcgcttttcggcttgcgaagttctgcaacgatttccggccgctgttccttcggagccttggcgatagcgcagatctcacggtcagcagctttgattttcccgtttagaatttcctcccgggcaccgggtgctgcttcgtctgcagcttccactccattcatgtacttttcggcacgtcgtaccgtcgcagacccaacaccatgttctacggcgattcgttcgcaagtgcgtttttctgaatcgatgtgatcattttgatcacatcgatttactttattgcaatttccgggctgcccgcccactgccagcttggttgattcatactctttgcccagaagaaacttctttcgttccgggctgagatttctgcggccaagctgatttttgcagatccatgcaagcgcttcgtacttgttcgcaagttggatttcttccacttcaaacttgataaagccgtgctttttcaggatgcggtagcgggtgtgcccgtccagaatggttttgttccacacaatgatcgggtctgtgagctttccgtctcgaatcatgttcattttaagctgctggagttcatcaaaactcagcggcaaaatttgagcggaaaactcggggtctattttgagactgcttagtttcagcatattattcgcctcctttgacaacagtgtaccggtttccgcagcaaaagtttatggactcgtagtccaagttacccaccctcttagtccatgtgttgtatacaatgaagcaaaaataaaaatccgagccaattctacgatgctatagtgtcatgtgggtcagatcagggaaacggtgaaatttgataagtccaaaataatgttattttaaattatgacaaatgaatttgtaaaaagcacttgacattgataatcaaagcagagtatacttagcccaatgacagagtgaaatccgctctggctttctttttcaaaagcttttgttctttattgcacgtgacaactgaggtgtgaaatgaatcttggagaaattgcagatatccgtagcggacttgtcctttctcgaaaacaggcaagctccgactccccgcaggcgatccgataccaccagcttagtctacgggcagtaaaagcggaaggtgagatcgctcctgctgaattggagccgtattttgcgaaagaaccattgtccatagactatctgacgcagccaaatgacattgtagtgcgcttgactgccccctacacagcagttttgattgacgacaccacacgcaacttggtgatcacgtcgaattttgtcgtaattcgcattcggggaacagagcttgtgccggggtatctttattggtatctgaacacgccgaaggcaaaaaggcagatctatcaaaataccacaaaaagtatgatcagctccgtaaacgcaaggtatttttgccgcttggagcttcagctgccatcgccggaaatacaacgccagatggaagcgcttcgcttgctggcacagcaggaactacgccttctgcgtaagttggaagctgaaaagcgaagctgctatgaggcgatgctggaacaaatgaattacgcacagaggaaaggataacgactatgacgacaaaatcagaaatcgaacgcgttctttggaacgcctgcgacagctttcgcggtaaaattgacagttcccgttataaggactacattctttccatgctgttcgtaaaatatctgagcgacgtttcggaggaaaagcgagagcaataccgggagcaatacgacggtgatgaacgccgtgtagagcgtgccatgagccgggagcgctttaagctggacgatacatctacgtttgggtacctttataaaaatcgccatgattccgaaatcgggctgaagatcaacacggcactggcatctattgaagatcataacagcagcaagcttcggaacgtgtttcgctccatcgatttcaactccaatgtggactttggtacagacatcaaggcaaaaaatgcgaccctctgcaacctgctggaagacttccacggacttgacctgcgttcttctgcgctggacggttctgacattatcggtgatgcctacgaatacatgatcggcaactttgcttcggacgccggcaagaagggcggagagttctttacgccgagcaaggtctccgaactggcagcggcattggtagatccgcaggaaaatgaccgtatctatgacccgacctgcggcagcggtggtctcctgctcaaggcatgcaagcgcgtgccggacggaaaagtggcagtttacggtcaggaattaaacgcacagacatgggctctgtgcaagatgaatatgttcctgcacgaggtagacgatgcccgcatctggcagggcgataccctgagcaatccgcagaacatcgaaaacgataatctgatgctgttccagtgcattgtggcaaacccgccattcagtttggacaaatgggacagcggcttcctttccaatgcggttctggattccaagggaaaaaagccggaaaaaatgaacgcttctctggacccatgggggcgctttgattggggcgttccaccatcttccaagggtgattatgcttttgttctgcatatgctcaacagccttgaccgcagtcatggccgaatggctgtcgtgctgccccacggtgtactgttccgtggtgcgagcgagggcaaaattcgccgccagattgttgaacacaaccttctggatgctgtgatcggtctgcctgccaacctgttttatggcacgggtattccggcctgcattctggtgttccgcaaggatcgcattagccgaggtgtcgataatgttctgttcatcgacgcttccgcagagggcaacttcgagaaaggcaagaaccagaaccttctgcgagacacggacatccagaaaattgtggatgcctacaaaaagcgtgaaaccacgccgaagtacagctatcgtgcgacgctggatgaaatccgggagaacgactataatctgaacattccccgctatgtggatacttttgaagaggaagctccggtggatattcaggcggtgaagaaaaatattgcggatatcgaagctgagctggcacaggtacaggagcagatgaaaaagtatctggatgagctggggttgtaaatgtttaaatgaggcaatgcacaatttatgatacaaaaattctgaaatattgttgtttaaattgtacattggcgtatgatatactttcttatggaaggaaagcaagaatatggctgatgaaagcttatcgactgcaggaagtaactcgcaggaggaaggaaaaatgggagcattgacggattttttaggagccggcgaagttgctactgcgctaggtggggttgtcactgcattactggataaactggagcatgcagtggggtggtgtgcaaatcatgatacaccaagtcgtacagcagtaaatacttatattgaagaaattcaaaatagcgacaaggacccattggttaaagctgcattgatcagtaactcaaaaaagattattaaggagtactgcaaccaagaagatattgtagccattgcaatacaatctgtgaaaagtgatgcaaaaccagaaaatattgatgatgactggctagcacagttcatggataaagctcgtcttgtatcgaaaaaagaatttcagttgatatggggtaaaattctggcgaatgaatgtaatcatccgggatgtataccaagagttttgttagaaattctttcacggatggatacacttgatgccgaagtattctcttttttgtgttcaacaacaattgctttggaagatgattgcgctcccgttataatatacgataaactcgaagattataatttcccgaaaatgacattcgaccaattgctagacctcgaggcattgggcctgatcagcacagattttgtcggatttcctggaggattttatatgtccgcttcaaaagaaaatagtagagtgtgttattttgaaaaattcaagtcagttgaaaaagatgaaaaagttccagttggaaatattatctatacaaaagcaggaaaggcattgtacaattccatacaatccgaaagaatttcaaacttttgggaggatcttattcttccatattggaacagcatgaaagatattattgaatcccagaccgaatgaggacggctgaagtgtgaaaatgaaagtagttgcaataaaatctatcgcagatgtttcttcgggaaatacaccaagtcggcggaagtcagaatattggaatggtagtattccatggattaccacaggtgaattggaatctggatatgtaacggcatcgaaagagtgcgttacagaaaaggccttaaaggaaactgcactaaaactgtatcataaaggaactgtcttaattgcaatgtatgggcagggaaaaacgagaggtacagcagcagtccttggaatcgaagctactgtaaatcaagcatgtgcagcccttaccgtacacagtggatgttcaaaatttcttttctatcagttgcaaaattcatatcatgcaattcgaagattgagtaataccggaaatcaggaaaacttgaatgcagagataatcaaaaatttcaagattccatggccagatgaacttgagcagcaaaaaattgctgccatcctctccacacaggacaaagtgattgagctgaaagaaaagctccttgctcaaaaacagcagcagaaaaaatatctgatgcagcagttgttgaccgggaaaaagcggctgccgggattttgtgagaaatggacgagaaaacagctcggtgagttatttgaaaatcgagttgaaatcaatcgaagtgatcttggtctccttgcaataacaagcacaagaggaattttgcctagggactgtcttgatttaaaagacaattcgagtgaagacaaatcaaaatatctaagaatttgcccaggcgatattggttacaataccatgcggatgtggcaaagcgtttctgcctattcggagtatgaaggtattgtaagcccggcatataccattctcgcaccgatggagggtgtatattcacgctattttgcatatctttttaagacacagtctgtgattttttctttttaccgtttttcccaaggacttgtagatgatacaagaaatttgaaatatgagaattttaaaaagatcagcgtgtccatcccttcaaaggtggctgaacaaagagcaatcgttcaaatcttaagcactgccgaccacgaaattgacctgctccaaaaatccatcgaggctgaaaagcagaagaaaaaggcgctgatgcagttgctgctgaccgggaaagtgagcgtgcgaatatgacattagaagaaaaaacatacaaagaactatgcaagcaaattgttgaccgaacaaatcgccccctgaccgaaacacaaaaagaaattataaaggcaacaattgatcaggcaaggaatccgattgagttgatgtcgtccatagaggcgctgttaattgtttggaggtgctaaaatgcaaggaattttagaatttgtaaagcagcattttgatacgattatcacagtatcaattacgatactaggttttattgtgacttatttcatgaataaaaagagtgtacaggatgaattgaagaaagacaaggtgatgcacactaccgagcttatggaaacgcttccgtacgatgtgtgtcaatttatgaatgagttgtttcacaacaaaagcagaactatcacgaagcaatctatagatgtacatgaaaaaatattatctaaaattattgcttatggcagtgtcgacgccgtaaaactagcaattgttgttcaggaatgtgcgtatgaaaaagagcgccaatcgtcacaggcgggagtggatgatggaacgcgtctaatggctgcatatgcgctcctaattacgcaattgaaatttgatctgacatcagaagtgattcctgcaacttcgtggtttcgaatcaaaatcaaagattatgaaaaaatacgaattaaaactgaagctgcaattaacgcacttgttgatgaattgggattgaatagcaaatttaaaatctgaaggaggtcaccatgaacctcgataaatccatttactccgaagctaacatcagcaaaaagcctgcgctggaactgctgcaggccatggggtatacatatctctccccggaagaatgccgtcagcagcgcggaagtggctaccgggtgctgttgcgggatgtgctacgcggtcagctgcggaaactgaaccgctatacctacggcggtgtggaaaatgaattttctgcagtcaacattgagcacgccatggatgatctggaaataccgctgacggacggtcttgtgcgcaccagtgagaaaatctatgatgcgcttatgctgggcaaaagctatcccgaaactgtaggcgaaggaaggctgctgaacttcaacttgaagtacattgactgggaggatccgacgcagaacctttaccatgtcacggaagaatttgcggtggaaagcaccgatggacagcatgatgcccgcccggacatcgtgctgtttgtcaatggaattccgtttgcggtgattgaatgcaaggctccggatatcccggtggaacaggccattgagcaaacctgccgtaaccagcagcctcactatatcccccagctttatgcgtttgcgcagatcgtaatggcgaccaataaaaacgaggtacgctatgcaacaacgggaacaccgaaaaagttttggagcatctggaaagagcaagatgcagatttcctgaaccgggaaatggctcgactgaccccggttcggacaccaacggtgcaggataaagatattgtttctctgtttacaccggtccgtttgttggaactaacaaagtatttcgtgctgtttgactacaatgtgaaaaagatctgccgatatcagcaatattttgcggtgaatgaaattctgcacacagtcaaacagcgtgatgaaaaaggaaatcggcgcggcggtgtgatctggcatacacagggcagcggaaaaagtctgaccatggtgatggtggcgaaatatttgctgctggagctgcaggcagaccatccacgtgtagtgatcgtcaccgaccgaaaagagctggataagcaaatcacggcgacattcgcgcacacgcggcttcgccctgcgcgtgctaccaacgggcggcatctgctgggattggttacggatgagcgggtggacatcgtcaccagcatcatcaacaaattcagcactgccgagcggctggacggttgcaacaaatctcgggacatctttgttcttgtggacgaaagccaccgctccaattacggcaaaatgtcacataaaatgcggacggtttttccaaacgcctgctatatcggttttacaggaacgcccttgatgaagagcgagaagaacaccttgaaaaagtttggcggactgattcacaagtatacgattcaggacggtgtagccgatggtgcaattgttccactgatctatgaaggccgctttgtggagcagaaagttgacgaaaagaacatcgacctatggtttcagcaaacaacaaaacgcctgacggaatcacagcgggatgatctcgcccggaaatggagcagcatccgacggctgacctctacgaatgcacgcatcaaacggatcgctttggacatcaacgaggacttttgccgaacctataaaaatacaggcttcaagggaatggtcgccaccaattacaagcgggatgccgttcggtatctggaatgctttgagcaatttggcgatctgaactgcgctgtcgtaatctcggctccggatctgcgcgaaagtgtggatgatgcagatgaaggagcagacgacaaggtagttgcctactggaatcggatgatgcagcgctatggcagtgccgatgattatgaagaagcaatcaaggcacagtatcatgccggagaactggatcttgtgatcgtgtgcagtaaatggcttaccggctttgatgagccgctctgccaagtgctttacttggacaaagaacttaaggagcacggtttgcttcaggccattgcccgcacaaaccgcctgtgcgagggaaaaagctatggaatgatcgtggattaccggggcctgatcaaaaaattggatgaggcaatggagctttacagtggtgccgggctggaaaactttgatgggcatgatctgaaaggcgttgtggtggacgtgctctctgcgattggaacggtacgcagcgattattctgcactgatggagttgctttcggctgttcccggtctgacacttgccggaaccgatgcagaggcggtggaggttttcttagcggatagttcgaagcgggaagagttttacaaacggctgtgtaactttggtcgctccttgaatcttgttctgaattctgaaaaaacctatgaggcgctggcagtggaagagcgggaaaaatatatcaaagcattcggctttttctctgcggtacggcgtagcgtgaaacctcgttatggggattcaattgacaatcgggaatacgaaccactgatgcaaaacctgctggacgtacacctttcagtagagggtctgaagcgaatcaccgagccggtagacattctggacagagatgcgtttgaaaaggaattaaacgagttaggctcactgcgtgccaaagctgatgcgattcgcacacggctcgccaagagtatcaatacgaagtatcaggagaacccagcatactatgaaaatttttccaagcgcatcaaggaagcgcttgagctgtataaagcccggacgataacggaggcagaatatctggccaagatgcgggatattctggaggattaccgcacgggaaaaagcgctatcgcatacccggatcgtatccgagccaatgtccatgcacaggcgttctatggtgtactgaccgcgattttctccaatgaaaaattgtcagtggagcctgattttgccgccgagatggcactggatattacgacaatcatcgaaaagcatagccaggtggactggacccataacctgacgattcatgatcgaatctcacaggatattgatgatctgttttaccgctatcaaaaagaaaagggcctggtactttcttttgatgtgattgacatgattattgaaaatgttaaaacagttgcgttgcggaggtttgcatgatacagatttgtgcggttgagactgagcatggttgtatctgctatcagctagaacgaaagaacgtacgcaatatcaatcttcggattcggacagatgcctctgtttatgtttctgctccgaaagatgtctcggaaagcgttgttacgcaattcgtgaaacgacacagccgttacattgcagaggcacagcagcattttcgagaattccaacagtatgcaccgcagcctcgacattacatcagtggggaaagcttttccgttttgggacgcagtctgcgtctgcgggtagagcaagggaaaaaagacgatatacgttccgatggcgtttatctctatcttaccgtaaaagacacagaagatcaggaacaaaaaaagcgtcttgttgaccgttatctgaataagatgtgtcgcgaaatatttcagcagacggcggatcagctttatccgatatttcgaaaatatgatgtgccatttccacgaatccatattcgatcgatggatactcgctggggatcttgtcttccacagaaagctatcattacattgaaccggcacttgctcgaaatgcccgtcagttgcattgaatatgtagtattgcacgaattttgtcattttctgtacccaaaccactcgaaggatttttatgcgatactgtcgacacttatgccagattggcagcaacgcaaaaaactgttagacaaaaatgcacagtttgaatggagtcaaaaatatgaaacgttttgtggtggtgagagctgaagggtatatgaccagcagacccgcaagcagtgtcttcgtatatacaaagaccattttgcgttgcaaaatacttgttgggaaatcccaaacccttcaaatctgcaccgtcccggcgcaggctgcgcgatggaatcgctgaatagcacaaaggcatgttggagtccagatgtgaaaaaacggcaaagcagataaaatcccctttacaaatattctattacgctgtgattgcgttggcgttgacctgcttacagcactgacgatatccgcttcaccttcaagaacggtcaagaaatcaaggtataaaagaaccgccccaccatcggatttactccggtagtaaggcggtttttctgtgatattattcggattgcgttgttttcaaaaattcatcataactctcctgtagtctcttatttaagtcaccatagaaatattgttgaatctcttttttatgggtaggaacatattcatccacccaattttccaaacacgctgtcacattcactaaaagctcattcagatgcatatggtaggacccttcatgcggctgagcttcctttagataattactctccatcatcgctctccaagtatcgacaaatgtgtctgaattgtccatttttttagccgccatattgattgcctttattcggtcctgtgcaattctgtactgtcccaattcatagcacatttgatggaattctaaaggtacttcataaaacaaattgctttctaaaacattagaccaaaacccaactaaatctctttttatatcttccggtaaatcttctattagccttctgaccgatttttcagataaccctgttgcttcacagaatctaataacatctggattttcacttttaattgaagataagccaaacaggtaatctgctgaacatccaaaaaaatcacaatacgctttgacatatctaccctgcaatttatctgtaccttctaaatttaagtgttcctgtattctgcgcgtcatacttcctattatagatatctcgtcttcagatgcactgtctacagggactatctcctcggcatataaagcctgcgctaattctcttgccgttgaaagatttcgctcctccatcaatttccacagtctgttatagaaaatcttttcatcatcatgatttatagatttgaatgccattatatcacctcgttaaagacatatttatcttttttatgtttacaaacgattgaaacagacgattttaaagattgattcatccgtcatctagtagtatgatatagctacaccaaggaactgtcaatcccagacaaacatatatttaggaggttgtctatgaacaaacaaaatactatgcagccactcggcgaaacgaaatctcttcagaacatagtcatcgatgaagtctgtcaaaaaatttctgatgcagtaatcgatgccgaagccacatcagaagagaaatatataacaaaacaaaaattaattgtgtcggccgatgacatgaacacccaagaacagctggatgctatggacagaaattacgaccgcagaaatcaggagcgttggcaaaacgtactctattttgccgtagtatcttttagtgtagttggaatagcaattggtagccctattgcaatcaaaaacgtccacagacttctctcagccgcataagttgaactgaaaaagcccggagttttctacattgtatgaatttgatgttgagaattcgatgtttcgtcctattgacggttttgtgcagaacagctataatataatcgatattatcataattcaaattatattaagcaagaggtgaacggtatggacttcatcggcagaacatccgaactggcgacgctgaatgcagaattagagcgtggcagcggttttgtggtgatctatggcagacggcgcgttggaaaaacgacgttgattaaagagtttatcaaggataaacgagccttttattttctggcaacaacagaaagcgaagcccagagcatgaagcggtttgccggggtgctttcccgtaccacgaagaatcccatgctcagcaaagtcacattcaccgactggctggatttattccaagtggtagcagacgaccacccggacgagaaaaaggtacttgtcattgatgaatttccgtatctggtcaagacgagcccggatttcccgtccatcttgcaaaacgcatgggatgaagtgctgaaagaccataacgtgatgctgattctctgcggttccctcatcagcatgatgaaaaaacacgcacttgcctacgacagtccgctctatggccgcagaacggcgcagattcggctgatgcctttgcaattcacggatgtgtatgcggcacagaacctgtcgtttgagcaggctgtggagcagtatgccatcacgggcggcgtaccgaaatatatggagtttttccagacggacgagccgctggtggagcagattcggcgtgtggtactgtcaaaaaatggctttttgtatgaggaaccggatttcctgctcaacgaggaagtgcagacgcctatcaactatttttctgtgctaaaagcgatttcggacggcaaccacaagctgaacaagatcggtatgacgatggagcaggacacgtcagctattacgccgtacctgaaaacactgatcgaccttggttttgttatcaagaacgttcccatcaccgaaaagaatccagagcgttcccggaagagtctgtactatgtttcggacaacttcatccgcttctggttccgctatgtgtacccgttcaagggggagttggaactggacaaccaacagatcgtgctggacgagatgggcaaagactttaagcaaaaatttgtggctttcgcttatgagagcatctgccggaatatctttgcggaactgtgccgaaaggggcagatcgaatttgcgccctcacgcattggctcttactggcgcaacgacaacgagggagacacagagatcgatgttgcagcggtggaccatcagcataagcggctgttcctcggtgagtgcaagtaccatgcgaaacctgtggatgtggcggtctactctgctttgcaggaaaaggggcagtccaaagaacttacagcggcctttaagggctacgaaattgtgtacgggctgttctccaagagcggctttacagatcgactggtggaaatggcagcggagaattccaacctgattctgattcaggaagatgcagtttacaagaaataatataatccgaattatcataagtttaattatattattgtgggattttctgtgcgctatgtttagcgaccttgagccaaaatgtagcatcctttaggcaagatttagaaactacgccttaaaaagtagcaatctctgaaaaagtttagcaggtgttcatatctcatggggtacggaaagtgtggaaagtaatgcggaaagtgcggaaacttgccatagaaaagtggcaacctctacgctaaaagtggcaacctcatctcaaaaaatggcaacctctatgctaaaagtggcaagtgacatatacaaaatgccattatacagaatgcccactcccctgagaactcctcagacgagtgggcattcttcttcccgtgtatcaaatttgactttgcggtcactcaaactgccatcaagtcatggatcaaaaatcatcatttttcatttgtcccagagtaagtgcactgtttttgcacaccggcgggaaagccgtgtttttccttgcattgtctgccttactggagttttcactctccagaacggcccggtgggcgggcattcttttgctccttgtcggtgcgctgcacggcggcactataaaaggccgcctgcagcactcgtctttgattcggtcttatttacaccacttggcaaattcttcatccgtgcacttgacgtagtggctgccctccacatggtggctggtgcccttggaatagtcgatgccggaagtggcataatcataagtctcagccacgcggcgcttttcgactaccgggttcggcagcggaatggccgacagcaggctccgggtgtaggggtggatggggtgctcgaagatctcctcggtggtgccggtctccagcagatgccccagatgcagcacaccgatgcggtcggagatgtacttgaccatggacaggtcgtgggcgatgaacagataggccgtgccggtctcctgctggatatccttcatcagattgactacctgtgcctgaatggacacatccagcgccgagatgcactcgtccgcgatgatgagcttggggttcatgatgagggcgcgggcaatgcccacgcgctgacgctgaccgccggagaactggtgggggtagcgctcggcgtgctccggggcaaggccgaccttagcaaggatcttttccaccttttcgcggcgctctgcctgcgttttgtacagatggtggatatccagaccctcgccgatgatgtcctccacctttttgcgggggttcagggatgccatggggtcctgaaagatcatctgcatctgggtgcgcagggtattgttctgtgcatgggtcagacggccgctgatatcctgcccgtcaaaggtgatcttgcccgcagtggggtcgtacaggcggatgatgctgcggccgatggtggatttgcccgagccggactcgcccaccagaccgtaggtctcgccggggtagatctcaaaactgacatcgtccaccgccttgaccgtgaaattcttattgacgcggaaatactgcttcagcccttcgaccttcagcagcggggtcgtgctctgtgctgccatttattccgcctcctcgatcttttttgcttctgctttcatgcgggcaatgcgctccttgagctccggcggcatctccaccttgggggcccggggatccagcagccatgttgccgcatagtgggtatcgctgatcttgaacatgggcgggtcgatctcgtcgtcgatgttcagcgcaaagcggttgcggggtgcaaaggcatcgccgggcttctcgtgcagcaggttcggcggcgagccgggaatggtatacagacggtcgtcggcggtgtcaaggtcgggcatggccgacagcaggccccatgtataggggtgcttggggtcgtagaagatctcgtcgatggtgccggtctccacgatcttgccggcgtacatcacgtccacatagtctgccacctttgccacaacgccaaggtcgtgggtgatgtagatgaccgagatgccgcgctccttttggatgcggcggatcagctccagaattttggcctgaatggtcacatccagcgcggtggtgggctcgtcgcagatgagcaggtcggggtcgcaggagagcgcaatggcaatgaccacgcgctggcgcataccgccggacagctggtgcgggtagtttttcatccgcttttcggcatcggtgatacccacctcttccagcagttccagcgcctttttataggcttctgccttgggcattttgaagtgccagagcattccctccatgatctgcttgccgatggtcatggtggggtcaaggctggtcatggggtcctggaacaccatggcgatgcgcttgccgttgatgtggcggcggatccactttttgtccttttgcagcaggtctacgctctccgggctgccgtcggcgtggtggtagctgaaccggatgctgccgctgttcacggtggcattcttggccagaatgcccatggcggctttcatggtgacggacttgccggaaccggactcgcccaccagcgcgaccgtctcgcccttgtacaggttgatgttcacgccgcggatggcgtgcaccgggcctgcggtggtcttaaaggtgatatcaaggtctcgcaccgacaagacctgttctttttttgcttcaggcatggggtgttcctccttacatactcttcatcttggggtccagcgcctcgcgcagaccatccgccacgaggttgaagctgagcatcagcaggctcatgaccacaatgggcgggatgatctgataggggtgggtggtgaagctgttgtacagctcgctgatcagagagcccagcgagcactgcggcaccgggatgcccagacccacgaaggagaggaacgcctcggtgaagatagcagtcgggatgctgaacatgacctgcgtgatgatgggtccgatgatgttgggcagcacttccttgaagatgatgaaaaagctgcctgcacccagcgtgcgggaggccagaacgaactcctgatccttcagcttgagcatctccgcgcgggcgatgcggctcatgcccacccattcggtcagcatcagggcaaagatgatggtcaccatgccgggctgcaatacgagcagcaacagcgtgacgatgaccagccgggggatgccgttggctacctccagaaagcgctgcatcaccatatccactctgccgccgaagtagccggagatcaggccgtagctcatgccgatgaccatatcaatgatcgccgccgccaccgcgatgatcagggagacccgggcaccttcccatgtacgggtccagatgtcgcggccgtacagatcgctgccgaaccagtagtagacgtccagcttgtctttttcctgataagcgttggtcactttggttccggtggtggtgctcatcttctcgctgccgtccagaacgccgaactgctcaatgcccggcacgcggggcgcaaagtttttctggctcagatcctgcccggagtaggtgtagctgttcatgcccgggcccaaaacggccagcagtacgatgatcacaatgaggacaagccccagcacggcactcttcttattgaaaaagcggatgagcgcttccttccagaagttctgcgccgcaaagttggtatccacgctgatctcgtcctcgttgtgcttgagggcaaaatccttttccgcaaaggtgtgctccgtgtacattgcgtccacggcgctgacaatggcatcggcggtggattcgccgcccagccggatcgctttttctgccatttagtcgtccccctttgccaaacgaatgcgcgggtcgatgatgccgtacagcaggtcaacgaccagcatgatgccaatgtacatggcgctgtaaataaagctcagaccaatgaccacgttgtaatcgttggactggatggctgtcaccagcaggctgcccacgccggggatggcaaagatcttttccaccaccagcgagccggtcatcagatccacgatcagcggtgccagcaccgtgatgatggggatcagggcgttgcgcagcgcgtggcggaagatcagcgccgggccggaaatgcccttactctcggccagcagcatataatccgaatccagcacctcgatcatctcactgcgggtaaagcgggcaatggacgccatggtgaacatggaaagcgagatactgggcagcacgctggagccaaaaatgtccttggcggaaaacagcatggggaaccagcggaacttaaagccgaaggtgtagctcagcgccagcgcgaacacataggacggcaccgatacgccgatgaccgagatgatggtggcgatggagttcaccacggtatcccgcttcaaagcggcaagaatgcccagcaccagacctgcgatggcacccagcgtgaccgccatgccgcccacctgaatggagatgggcagacgggactggatgagctgggagatgggcgtatttttggagatattgtagctgacacccagatcgccccggagcatattgcccacatagcggaagaactggatatagatgggctggtcaaggccgtactttgcatacagggctgcccgcatatcgggcgtcagcttttcatcattgaagggcgaaccgggcatcagctgcatcaggatgaacagcaccagcagaattgccagcagcgtgaacagcgaggtcaggattcgcttgagcgtatattttttcacgtcgggtggaccccctttttccttccgggatctcgcggtcagtcgtttgtctgccgcggacaggcacaatgccaaaaaggcgcacagtggctttttgcgggccactgtgcggccttgttcagtgtgctttcagttttactcgctcttagcggcgttcttgtacacgcggttcagtgccacggggtggaacgctacaccggtaacggcagaggagaccatctcggcattgcactgaccgtacagggggaagatgaccgcctgctccagaacgatctgctctgcctcgtacagggcagcccagcggccctcggggtcggtgcacaggtcgccggtggtgcactcgtcaatgatggcatcgtagtcggcatcgctccacagaccgtagttgttggagttgccggtcacccccatgcccagataggtcatggggtcggcgtagtcggggccccagcgggtcaggccgatctcaaagttgccgtcctgcatatcctgcacgcgctgcttcttgggttccacggtcaggttcagggtaaagcctgccaacgtggtctccagctgctccttgacgacctgtgccaccttctggggtgcatcgtcggcatccaccaccatgttgaaggtgaaggagtccttgcccagctcggtcttggcctgctcgtagtactccttggccttgtcggcatcataagcgcagaactctgcaaacttggtctggtcggcgctgaaatcgctgccatcggggccggtagcaaactgcggcggaacgacggtgtagcagggtgcagagccgtccttcagcacgtctccggtaatggcgtcacgatccagtgcaaaggtgatggccttgcgtaggttctcgttggccagctccggcacactgccgatgttggggctgatgtaccacaggtaaccggcacccacgctggtaaactcggggtcatccttgacctgatccacctgctcgccgttcagcagagtcatgtccagagcaccggtctggtagctcatcagtgcctgctggctgtccttgatgacctgataggccagaccgtccagagcgatcttgccggcatcgtagtaatcggggttcttttccagcgtaaaggcggttgcggcaggctggtagtcggtcagcttgaacgcaccgttggacagcaccgtgtcggggctggtgccgaaggtgtccttgcaggtgttgtagaacgcctcgttgaccggatagaaggtggggaagtacatcaggctcaggaaatagctgacgggaacgttcagctggacttccagcgtcttgtcgtccacggcagtcacgcccagatcggtgacgggcttctcgcctgcaatgatctcggcagcgttgaccacctgaccgatatccgacagcatataggaatactcggaggcggtggcggggtccacggcgcgctgccagccgaacacgaagtcggcagcggtaacggcttcgccgttggaccacttggcatcccgcaggtggaaggtataggtcttgccgtcctcactgatgtcgtaggtctctgcaatggcgggaaccgctgcgccgtctgcatccatctgcatcagaccgtcggtgtagtctgcgatgacctcaaaggaggtgccgtcggtggctacctgcgggtccagcgactgaacctcggtctccagcatgatattcagggtgccgcgctgtgcgttcatttctgcggtttgtctaacgtaacgcccaaaaaatcccatgatttttgtacaatttcagcccatgagcatatttcacttttaaacaagcgcacttgaacaatcgtgttattccttttttatttcttgtttttgagcggctttatttattttataaatcaagtcacacgtttttcttttcgatataaaatgcagacaaaacgcagactttcatttcgccgttgtccttgtgcagaggacagttatagaggcaaaaagaagccgccgcacagtgttttgtgcggcggctttaaaaatcgaattcgtactgctgtaaaaagcgcttacttgcccagcatctcgtgggcagtcttgcagatggtggcagcgtccagaccgaacttcttcagcagatcccatgcggggccggagcagccgaacacgtcctgcacgcccacgcggcgcacgggagtgggcagcttctcgctcagaacggcgcagacggcctcgcccagaccgccgatgacgttgtgctcctcggcggtgatgaccttgccgcactccttagcagccttgaggacgatctcttcgtccaggggcttgatggtgtggatgttgatgacccgggcgtggatgccctcggcagccagctgctcggcagccatgcgtgcctcgttgaccatcaggccggtggcgatgatggcaatatcgttgccctcggtcagctgctcgcccttgcccagctcaaagtgatagttggcctcatcgtggaacacgggcacagccagacggccgaagcgcaggtagacggggccttccatggcgtaagcggcgcgcacagcggcgcgtgcctcgatatcatcggcggggcagatgacggtcatgccggggatgctgcgcatcagggcaaagtcctcgcagcactggtgggaagcgccgtcctcgcccacggagatgccgccgtgggtggcgccgatcttcacgttcaggtgggggtagcccacagagttgcgcacctgctcgaaggcgcggccggctgcaaacatggcaaagctggaaacaaagggcacatagcccatagtggccagacctgctgccacgcctaccatgttgccctcggcgatgccgcagtcaaagtgacgatccgggtatgccttctggaacataccggtcttggtagcggcggccagatcggcgtccagcaccaccagatcatcgtggccttccgcggccagctccttcagggtgttgccgtagctgtcgcgggtcgcgatctttttcacgtctgccatctcagttctcctcctgttccagcgcggcataggcggcgttcagctcgttcatggccacctgatactcttcatcgttggggcccttgccgtgccatgcaacggaattggtcatataggaaacgccggtgcccttgaccgtatccagaatgatgcaggtgggcttttcggtctcggcgtggaaagcctgcacggcgctctcgatctggtcgaagtcgtggccgttgatggtgaccacattgaagttaaaggcgcggagcttatcttccagcggggcgctgttcatgacagtctcggtggtgccgtcgatctgcagatggttgcggtccagcatcacgcacaggttagaaaggccgtagtgggcggcaaacataaaggcctcccagcattcgccctcttccacctcgccgtcgcccagaatggcgtaaacgttcacggcagagccggcgtgctttgcgcccagcgccatgccgcaggcggcggagatgccctgacccagactgccggtggacatatccacgccgggcacgctgttcatgttggggtggccctgcaggcggctgccgatcttgcgcagggttttgagctcctccaccgggaagaagccccgctctgccagcgctgcgtacagcgccggggcggcatgacccttggacagcaccagacggtcgcggtcggccatcctgggctgggcagggtcgatgttcaattccttaaagtacagataagacagcacgtctgcgatgctcagactgccgcccggatgaccacagcctgcactgtgggtcccttcgatcacgcccatgcggatgtggcaggcgtgctttttcagggtaagtttttcagcatttgtcatgatggtcctcccgtatgaacctcagaattcatgcgctcaaaaaagcctctcgtcagcgccccggcgtcaagattgccgcagcgcgctttttttcaattttatattatccattctgcgcaaaaaggtcaagcttcttccagcaaaatgtacagccccggggaaatttttttgcgaatagaccgatttttgtctattttgcagacgttccgccccgcttgacaggggcaaactggtttgttatacttttgaccatcgttccggcaggaagccggacacgggcgggcagcagcctgccgcttatcccagcaagcaatatttttttgaaacagacgccacgaaggggtctgcctttggcatggaatgccggggcaggctcctttttattttgcggctgaaaatggaggaatccttatgaaaaccaaaaacgcttcgcctgtgcggcagctggtgccggccgccctgtttttagcgctggcctttgtgctgcccctgctcaccggacaggtgcccaaggtgggcaatatgctctgcccgatgcatttcccggtgctgctgtgcggctttgtgctgggcggcccgtgggggctggctgtgggctttgccgccccgctgctgcgctcggtgctgttcggcatgccccccatgttcccggtggccatctccatggcctttgagctggccacctacgggctggtgtccgggctgctgtggcgcagggcaaagcacagcctgcctgcgctttacgccgtgctgctgaccgccatggtgtccgggcgcatcgtctggggcatcgtgcggtttgtgctggccggactgaccggcggcagcttccccttcagtgcattcctgtccggggcactgtttaccgccgtgccgggcatcgtggcgcagctggtgctcatcccgctgctgctcaccgccctgcagaaggccggctttgcggactgaccccctgcacgcaccttttgtgcaaaaaaacgatacttcaaccggtttttaaggcactttttccaaaagaaacggaaaaccggaaaaattgtgccgttttgtggctttctgttggcaaatgtgataaacttgaaccagatgcgggcgtgtgccgctgtgcactgcccacaaggagtaaatgaagaagagaggtcgtttatcgtgaagatcattcgtacaaaggactacgctgatatgtcccgcaaggcagcaaacatcatttctgcgcaggtcatcatgaagcccgactgtgtgctgggtctggctaccggcggcacccccgttggcacctatgagaagctggtggagcgctacaacgagggagatctggatttttctgaggtcacctccgtcaatctggacgagtaccgcggcctgcccaaggagcacccggaaagctactggagctttatgcaccgcaacctgttcgaccatgtgaacatcgaccccgcccacatcaacctgccggacggcaccaacatggacgccgaagccgagtgcaagcgctatgatgaggtcatccgcagcgtgggcggcgtggatctgcagctgctgggcatcggtcatgacggtcacatcggcttcaacgagccccacgacgcctttgatctgggcacccactgcgtggacttggcccaggagaccatcgaggccaacaagcgcttctttgacggcaacgaggatctggtgcccaagcaggcttacaccatgggcatccgcaccatcatgcaggcacgcaaggtgctgatggtggtcaacggcgcaggcaaggccgagatcgtcaaaaaggctttcttcggccccgtcaccccggaggtgcccgcaagcattctgcagctgcacccggacttcattctggtgggcgatgaagaagctctgagcctgatctgattttccttatttaaacttcggggcaccggaacacctgcgggcgttccggtgttccttttttgaaggggaagaaccctctcagtcatcgctatgcgatgccagattcccccttttgtcacctgcggtgacatcttcccccggagcgggggaagtcgttcctctcagggggagcttttatgcatctgtcggtcagcactaataaaattccctttgtgggagcagactgagagggttgaacccattttgctgtcctctctttacattccgccgaaaaagcggtattctttttccagaacaaactttcccgggaggagaccatggatatccgccagctgcactactttttgaccctgtgcgaagaaatgaattacacccgcgccgcacagcggctgttcctgtcgcggcaggcgctgcgccagagcatctctgcgctggaagccgaaatgtgcgggccgctgtttatcagcgcccaccacaagctggcgctcaccgaccgaggcatgagcctgcagcgccacgccgccccggtggtggagcagttccagcagatgcaggccgcgctgcgggctgagattcagtctgcccagccggtgcgcatcggcatcagcgtggcgctggtaccggactatctgcccgggctggagacccagctggacaagttccggcagcagtacccccatgtggagatgcggttccgtctgctggacaacgacgccgtggccgacggggtggagcagggcgagctggacgcaggtctggtcatcgaccttggctgcgccgcgccggtgctggcgcgcaccaccctgcgggcagaccccgcctgcctgctggtgccccggggacaccccttctgggaaaaggagcgcatcccgctggcagagctgcgtgggcagcgggtgctgctgcccagcctgcggcaggatctgttcagcccgctgtgggcggcctgcgcccgggcgggctttgcccccaacgccgagatcggccccagcttttatcaggcctactatctggtgcaggagcagctgtgcacctgcctgacccgctacgagcccggcgcccgccgggagctggaccgggtgcgggacgtgctgctggaagatatgcccccgctgtgcgtgtcgctggtgcagcggcgtgacaccagctctgcctatatcgacctgctgcgcagctacctgctggaggttctgggcagcaccgccagcctgccgccccgccggggtcggccggcaaagcccttctacaccgcgccggtgctttccagcgccgccgcaaaggctgccccggagcatcccgtcccgggcacccagctgccctttgcgggcggcaacaacttccgggagctgggcggttaccgcgccgacgagggcaagaccgtaaagtgggggcagatctaccggggtttccccaccgggcggctgaccaccgaagccgaccgcgcccggctggacgggctggggctgcggctcatccttgacctgcgcagcagcgcagaagccgccaagctgccggactatgtaccggacggcgcacggctggtgcaaatctgcggcctgcgggatgccaccgggcaggaaattgatttttcgccaaacgacatccagcggctggtgcagagcgcccccgccgggatgagcctcacccagctgatgtaccggcagatgctcaccggcaacaaggccttcaaggagctgttccgggcgctggaagccggcgagacgcccatcctgttccactgcacggcgggcaaggaccgcaccggtgtcgctgccatgctgatcctgctggcgctgggtgcctcggacgagaccatctgcgcagattatgcccgcaccaacctctgccgcgccgccgagatcgaaaaggccatggctgaccatgcggcggagatcgccgccgacccggcgcagcggatgcgctggcagacttccgccggggtagacccggagactgcgccctttgtgctgcgcaccatccggcaggactacggcagcgccgagagctatctggaagccgaatacggcctgacccccgcccgcctgatgcggctgcggcggatgtatctggaatgagacgattttgaatgccctccgcgttgctctgggcattttcagcggaaagaatatttataatttcggggttcagaaacgcctgcgggcgtttctgaaccccattttcacggggaggggttgcaacggcaaacggcagctgccgcgctggtttcctgcggaaacagccgcgcggcgggggaagcctttattaggaaaattgatttccatggtaaaagtcgattccctcttgaaaaagagcctgttgtccgatacactgaatataacgaatcttataagaaggaatgaaactgaccatggctgcaaaaacgcctgcccagtggaaaacactgtttgaaaacgtacccttccaccgcgaaaactattataccggcccccttgggccggactacacccccggcggcacctgtctgcggctgtgggcacccaccgccgaggcggtcactgtgaccttataccacaagggagacggcggtgctgtgctgggcacaaagccccttgtgcgcggagcgcagggggtgtggagcatctggctgcccggggagcagcacggccgctattacacctttgccgtcaccgtggacggcatcacccgcgagaccggcgacccctacgcccgggcggcgggggtaaacggcgtccgcagcatgatcgtagaccttgcccgcaccgcgccctccgggtgggagcgggatgtgcgccccaatatccccccggcgcagcgcgccgtgtgggaggtgagcgtgcgggacttctcgcaggatgccgccagcggagtgcgcccggcgtggcggggcaaatatatggcctttacccagcagggcaccaccctgcacggcgacggcatccaccccacctgcctgaactacctcaagcggttgggggtaaaatacgtccagctgatgcccatttttgattttggcagcgtggacgaagcaaagcccctgctgcgacagtataactggggctacgaccccaccaacttcaatgtaccggagggcagctactccaccgaccccacccggggcgaggtgcgcatccgggagtgccgcgagatgatcgccgccctccatgcggcaggcatcggggtggtgatggacgtggtgtataaccacacctaccgcaccgagaaccccctgaacagcaccgtgccgtactactttttccggcaaaacccggacggcagcttttccaacggcagcggctgcggcaacgagtttgccagtgagcgccccatggcgcggcggtacctcatcgactccatcctctactgggcaaaggagtaccacattgacggcttccggttcgacctgatgggcctgtacgatgccgagagcatcaacgcggtgcgcgctgcgctggatgccctgcccggcgggcggggtatcctgctgtacggtgagccgtggcagggcggtgccagccagctgcaccggtacgaagccaacaaggccaaccttgccatgctcaacgagcgggtgggcatcttctgtgatgacacccgggacgccattaagggcggctgcttcgatgcccgggagccgggctatgtggagggcaagcccggcagtttctgggatatcggcgcagcggtggcggcatggtgccgcagcgaccgtctgccgccccacgcgcccagccagatcgtgagctacgtttccgcccacgacaactttaccctgtgggacaagctgctctgcgttcgctacgaaaaaccggagttcaccgcccgggacaccgtggcgctggcgcagaaccgactggcggcgggcatctacctgaccagcttcggcctgcccttcatgcaggcaggcgaggagtttgcccgcaccaaaaagggggtagggaacagctaccgctcctctcccgccctgaaccggctggactggaaccgtgccgagcagtaccacgccctcgtggactactaccgggggcttctggcgctgcgggcagcctttccccggctgggcagcaccgaccgtcacgccccggaggcgctgcaattctttgcgctggagcagccgctggtgggctggacgctgcccgccgtctggggcgacggcgcagcatggagcgctttgtgcgtcttttataaccccaccgacaccacctgcaccgttgctctgcccgccgggcagtggaagctgctgagcgatggcacctcttccagcctgtggcgcggccaaagccgcgtttttaccggcaatgccccccttgcgccgtatagcgccactatttttggtgcagtgtaaataaagaacgaactccctcagtcaaaacctgacggttttgccagctccctctgggagggagcctctggcgtgacggctaagtttgcagtttagccagaaactgcaccgttatgccaaaggccccatcccagagggggctggcgccgtaggcgactgggggagttttttcacaaccaaaaaggggctgttgcactttcggctaaaacgatgtgcaacagcccctttataaattcagaatgatctttccgcgcattactttgccatggttggcggaagagagccacttgtttcgattgctggttcaattacataataggacggatgaatcagttcctgaaaccagaaaaacaacccataggcaaaccagagcactgcacaggcgatcaaaacgcctgccagaacgatggccagcaccctgcgccactgatactttttcaggagttgctgcacctgctttgcatccatctcgttcaacacattctcggcggcctgcgcaggtgtgccaaatacccgcacaagttcctgataatccgctgtgggatgctcgtccagatactcctctatggattccgtcagctgtgcaagcgttcgttcccgcagttccggcacacaagccagagcccggcgcagctcccggcaatagcggcggcaaagcttttgcttttcctgctctttctcactgttcaatgtccgtcacctctttctggcagctggtcagaatttcctgtacgccctgctggaccgtcatatactccgcaaagattttttggaaatatgcccgcccggcgggttccagatggtaataggtacgcttgcggcgtttgcccaccagctcttcccgggccgaaatatacccgttgtcctgcaatcggtataaggtcggatacattgatgtttccagcagcgtaaacttttcgtggcttcgttcccgcatcgcctgcgccatctcatagccatacatatcctgttggcttaaaagagcaagcagaacgatctcggtcacgccgcgctttaaattttcagagacccccatggcattttctccaattccggtattggtattttgattatatctacaaacttatttgttgtaaatactattcgccaaataatatacttgacaaatataaatagtcctgctatttttaatacaggacaggtcgaccagcctttatattctgttcaaaaaacaaggaggcttaaccatgaaacgagtttttgctgcgctaaacatacaaatatttgtatgtttgcttgtttcttttatgttgcttctgtgtggttgtaaccggtcggaaaccagcagcgatgcccccgccagttctgcaccggaaactgtccagacaacgcaagcacctgtaaaaaagagcaaagcgctcaccccgcaggaagaattggaaaaactggctccggtgccgcagactgcacagtgcccgatctgcggcgggacaaatcttcaggtaacgcttgcaagtgcagcgatccaaaaaggagaccggaatgcacagaagtgcatccattatcttgagggagaagattatatttacccgctaagcctccgcgtgtatgatgcttgcttatcgtgcacagatgcagagaacccttggcatggagaggaatatgatatcctgattggttccagcaccatctgtcatggctatcaataaaaacttccggtttctggcggacattgttacaaactgctatatttataattttcctgttctgcaacggaggaaaaacaatgcgtaattctatgttaaagcaggtcgttggtgcactcctgtgcacagcagttttgctggcatcgttttccgtttatgcttttgccgcaaaagagccgcaaaacacaaaccattcctctgccacggtgtcctttggcgtgcagaccgctcagtttatcgaatcccgcaccgagaccactgcagacggcacgcagaggcggtatggcacgctggcattttcctttgaagttgaaaacgcttcttttgaagcccatctgccgatcatcctgaaaaagctgccggatggcagtacgcagtacgaaaccgccacggattggttcagcgtacaggcaaagccgaaccgcaatgccgcccttccggccgcacagcaggaagctgttcccaagtggtatgtagaacaggcacaatgtgctgtttatgaatcgaccaccgatcctgcccgtttaatcctgaccgtacagggcgtgctgcaggacgagaactgggattgcgtacctttcatcggttccagtgaatattacttctgaatccctcctttgtttttgacattctcttttttatatccttaaaccaaaacgagagccggcggcttacaggccaccggctctcgctttctttatgctattttcagctattttccgcgcccttttcgccaagggtgacgttaacggtctgcatctggccgccgcgcgcgacggtgatctcgatggtgtcaccggccttgtggtcctgcatcagggtgccaaggtcgctctgggtggcaacctcgctgccgtctacgctcacgatgcggtcaccggcctgcaagcccgccttgtcggcagggccgcccttgaccacctccacgatgtagacaccataggcgttcacgcccagctgggcggcggtctgggcgtcggtcacggcatagtagctgatgcccagatagggacggccggtcacatagccgttttccagcagctcctgcgccaccttgacggcgtcatttaccgggatggcaaagcccagaccctcggcatcgctgtcggaggactttgcattgacgatgcccaccagctcgccgttcatgttgaacaggccgccgccggagttgccggggctgacggaggcatccatctggatcagggacatggtgttgacagagctggaaccctgaatgctgacgctgcggttcagggcgctgacaatgccgctggtcacggtgccgcccagctcacccagcgggttgcccacggccatgacgctttcgcccaccttcaggttgtcgctatcacccacggtggcgggggtcaggccggtagcatcgaccttcaccacggcgatatcactggtggtatcctcgcccaccagcgtagcggggtaatccttgtcgccgatgctcacggtgatgttggatgcaccgctcaccacatgggcgcaggtgaggatatagccgtccgagctgatgatgacgccgctgcccgcgccgctctccacctgactctggccgtaccacgaccactgggagtagaccacctgctcggtggtgatgaccaccacgctggggctgaccatctccgccacctgtgcggtgctcaggccggtgccgctggtggcgctgatggaattgccggtgctgtcggtgctgctgtcagagctggccgggcgctccacctgctggatgaccaccttgctgccgccgccgtattttgcacccacaaagccgcccgcaaagcccatggctgctgccagcaccagcgccacggcgctgcgtgccagttttccgccgttgaactttttcttgcggcggggcttttccggctgcgccggggcgctgtactgcggctgctccggcggggtgggcggcacgctgccgccatctgccggggcggtatcggccggacgcgcgggctgcgcttccggctcgttatactggttcgccgtgttcatgccgctgctgcccacgtttgggtagccggtctcgttattggaagcggaataatcgtattcccacttgttctcgttttccatgttactacatccttccctcaaaggccggtccgcagggacatctgttcctttgaactgtccctattgtaactgtcaaatgtgaaaatcaatcgcttgcgccgtgaagaatatgtgaaatgcggtcctgtttttccgcccttgacagcagcgtttccgcttgctattgtaagggaagaacattggcccgtcaaggaggagttttttatggaactgcgccgcaccgaacaggggtttgccctgtataaagaaaaggactgcatcggagagtgccgcctttctcccgcccccaagggcgcacagcttgccgccctgtgcatcctgccccggtggcggcgcaagggctacggctcctacctgttaaaagaagtattgcgcagctttggcggctatgaccgggaagctgccacggtttttaccgccccgctgccggaaaacgccgccgagcttgctttctggggcaaattcggctttgccgccgagggcgggcagctggtgcgccgccgcaccccggacctgacggcggtcaagttcgtgcaggactttttagccgcccggctggtgcacccgcagctgtgcgtggatgccacctgcggcaacggcggcgacaccgcctttctgtgcaatctgactgcccccgccgggcgggtactggcttttgacgtgcagcccgaagccatccgctccacccgcacccggctggaacaggcaaatgtgcccgccgaccggtacagccttgtctgcggcagccacgccgacttattacagtatgtgcagcccggcactgccgatgcagtcatgttcaactttggctggctgccgggggcggaccatgcggtattctccaccgcgcagagcagcatccccgccttgcaggcggcgctgcaggcggtgcgccccggcggcatcgtgagcgccatcctgtacagcggggcggtcatcggctcggacgaaaaacaggcggtgctgcgttttctgcgcgcacttccactgaaaagtttcaccgttctggtgtgtgattttgccaattgggccgaaactgcccctctgccctgcctgatcctgaaaaaataacgaaaacccttgcattatcacgcgttttcgtatagaataaggtgcgtatgtgtaaaaatgcttcttccggcatcgcacagtgatgccggaagaagttccatccatttcaggagaaatatcatctatgacaaatcgtgaagagatcgaacgccgcaggacgttcgccatcatcagccaccccgacgcaggtaagaccacccttaccgaaaagctgctgctgtacggtggagccatcaatcaggctggttccgtcaagggcaagcagagcgccaagcacgccgtgtccgactggatggacattgaaaagcagcgtggtatctcggtcacctcttcggtgctgcagttcaactacgccggtaagtgcgtgaacattctggacacccccggccatcaggacttctcggaggatacctaccgcaccctgatggcggcagactctgccgtcatggtcatcgacgccgcaaagggcgttgaggcgcagaccatcaagctgttcaaggtgtgcaccctgcgccatatccccatttttaccttcatcaacaagatggaccgcgaagcccgcgacccctttgagctgatggagaacatcgaggaaattctgggcatcaagacctaccccatgaactggcccatcggctgcggcaaggagttcaagggcgtgttcgaccgcaacgcacgcaaggtgctggctttttccagcgatggccgcgccaacggcgtgaagaaggtcagcgagaccgaggccgagctgggcgaccccgcactggacgagctgctgaccccctatttgcaccagcagctggtggacgagatcgagctgctggacggcgctgccgaggagtttgatctggacaaggtgctgcgcggtgagctgagccccgtgttcttcggctctgcattgaccaacttcggcgtggagcccttccttgaaaacttcctgcggctcacctccgccccgctggctcgcgtggacagcctgaccggcgagccggtggacccctgccgggacgagttctccgcctttatctttaaaattcaggccaacatgaacaaggcccaccgcgaccgtattgcctttatgcgcatctgctccggcaagttcgagcgcggcatggaagcctaccatgtgcaggagggcaaaaacatcaagctggccaccggcacccagctgatggcgcaggaccgcgccatcgtggacgaggcctacgccggcgacatcatcggcctgttcgacccgggcatcttctccatcggcgacaccctgtgcaccggcaaaaagaaggtccagttcgcgggcatccccaccttctccccggagcactttgcccgcattgagcagaaggacaccatgaagcgcaagcagttcgtgaagggtatggagcagatcgcgcaggaaggcgccatccagatcttccgcgaagtgggcggcggcatggaggaagtagtggtcggcgtggtcggcgtgctgcagctggaagtgctggagtaccgtctgaacaccgagtacaacgtggagatccgcatgcagcagctgccctttgagcagctgcgctgggtgcagaacgaccctgatacctacaacctgcgggatctggacctgaccagcgacaccaaggccgtggaggacatgaagggcaaccgtctgctgctgttcacctccgactgggcggtgcgctgggccgagacccacaacgagagcttgcagctgagcgagttcggcaacatctgataaaagagcgctgcggagtgcacctgcgctccgcagttcttttttatagaataaaaaacacaacaaagtatgccagacattggaatgagggttcccattgcggggaacactgctggcacggagggtaaagtatatgcagaatatcaatattggcaaaagcggtattgccgtgccctttctgggcatgggtacatgggccatcggcggcggtgcatggtggggcgataacgacgatgcactgtccgtaaaggccatccagaccgccgtggagcagggcatccagtggatcgacactgcgcccatctacgggctgtaccacagcgaggaagtggtgggcgaagccatgaagcacatcgaccgcgacaaggtggtgctttccaccaagtgcggcctggagtggcggcacgagtcccccatcctgcacaaggtggtggacggcgtacaggtgtaccgcgacctctccgccaagagcatcatcgaggacgtggaggacagcctgcgccgtctgcacaccgaccatctggacgtgctgtacacccactggcagagcccggacttcggcgtgtacccgctggaagagaccatggaagccatgatgaagctgaaggagcagggcaagatccgcgccatcggtgcttccaacgtcacctccgatatcatccggggctactgcaagtacggccagctggacgtcattcaggaaaagtacagcctgctgacccgccgcattgaaaagcagctgctgcccacctgcaaggagctgggtgtctcggtacaggcctactccccgctggagcaggggcttctgaccggcaaggtgaccatggacaccacctacccggagggcagcacccgcaacacgaacccctgcttccagcccacccgccgggcacaggcgctggaactgctggcaaagtggagcgatctgaccgagaagtacgactgcaccatggcgcagctggtcatcgccatgaccgcccgcatgatcccggggctgcacgttctgtgcggtgcccgcaagccggagcaggtactggacaacgccggtgcgctgcacatcaagctggacggcgccgacgccgtccgcatgaagtgggacgtggacgcgatctcctgagcataagcagaacaacaccggagcatcttcggacgctccggtgttgttttttatctcttattctccccttgccagcgcctgcagctttttcttatccagcacctgcacgccgccgcggtacagccgcacccagccctcctgcgcaaagtatttgagcatccggctcaccacctcgcgggcagagcccatgtactttgccatctggtcgtgggtcatgcggaggtccgcgccgccggtcttggcaagctcatcggtcagaaagatcgccagccgccggtcggcgctcatgaacaaaatctgctgcatcgtccacatggtatcggaaaagcgctctgccgtcatctggtaggcgtagcagcgcacatagacgttttcctgcatcagctgccggaagatgcccgcgctgatgcacagcgcttcggtgtcctcctcggcatcgatgtagaggtcgatgttcaccgcgtccatcacgcaggaggcggacagaatgcacacctccccgccgaacaggcggtacagcgtcacgtccctgccgtcctcggacagcagataggagcgcagctgcccgctgcgcagcaaaaggatgcccacacagctttccagcgggctgtgcacccgggcgcccttggcgtagtgcaccgggcgggtaaagcggcacagccgctcctgttcttccggggtcagctgctcccagaacggaaacgcacaggccaagcaccgggcgtgcggagatgcttctgccatacggttcacccctttcgcagcgccttggcggcttccgtgcccgccagtgcgccctcgtaaacggcctttgccacctgcaacagcccgccggtgcagtccccggcggcgtacaggccgggcacggtggtctgcattttgtcgtccaccacgatgcggctgccctctacggcagcgcccagcttccgggcaagtgcggtactgcccgccacgcccagcgccacaaatacgccggatacctcccgcaccgcaccgcccgccagctgcacgccggtgacagcctgctcgcccagaatggcttccaccttctgggtgcagacgctcacctcgggcgggaagtctgcggtcagggctgcgccgttcgtcagcagggtgacgctttttaccaccggcaaaagcgcctgcacctcatgcagggcgtactcgccgctgcccagcaccgccacgtcctttccgcggtagaaaaaggcgtcgcaggctgcgcaccagcttacgccgtggccttccagcccggtcagccccgggatgcggggcaccgcgcgggaagcacccgttgccagaatgaccgcgtctgccgggtacgcgcctgccagcgtttccacggtcaaacggtcggtccatgtcagccccacggcctcggtctgcacgaattgcacccccagccgccgggcgttctcgatgctgcggcgttccagctcctgcccggagaccggctgggcgaagccgtaataattttcgatcttttcggcgcgcgccagcgccccggagcccttggtcagcacggtggtctgcaccccggcgcgcacggcgtacagggcagcggacacccccgccgggccggaacctacgataacgatgttggacatggtgttgctcctttgcatggttcattgcccttattatacaccaaagccgcgcagatttctgtgaccgggtcgcaaaaactttttgggcggcgggcactgttcaagctccggggcgtgtgctatactgttgtcatgttaaaatttctgccacagggggcttttgctttatgtccaaacaacgtctgcttttcatcaccaccggcggcaccattgccagcgtgcgcacccagcaggggctgaagcccgtgctttccagcgaggagctgcttgcccatctgccggaactaaaggagctgtgctgcccggaaacgctggcgctgtgcagcatcgacagtaccgacctcggacaggagcactggctcatgatggcacgcgccattcaggaaaactacgccttgtacgatggctttatcatctgccacggcacggatacgctggcgtactctgcggcggcgctctcttatctcatccagaacgcggataagcccatcatcctcaccggcgcgcagcagcccatctccaacgagatcaccgacgccaagaaaaacctgcgggacagcgtggtctgcgccatcgacccgggcagccggggcgtgatggtggtgtttggcgggcacgtcatcgcgggcacccgcgccaagaagaacaagaccatcagctacgacgcctttgcctcggtcaacttcccggaattggcgctggtgcagggcgaccggctggtgcggtacatcccctcgccgtggcccaccggcccggtggagttcagccgcacgctggacagccgggtgttcctgctcaagctgaccccgggtatgtccccggcgctcatcccggagatcttccacctgtacgactgcgtcatcgtggaaagctttggcgtgggcggcatcccgcagcagctgatggacgcctttgccgccgggctgggcgattacgagaccacccacaaagtgctcatcatgaccacgcaagtcacctacgagggcagcgacgtgggcgtgtacgaagtgggcaagcgggtgcgcaaccgcttccgcttcttagaggcccacgatatgaccatcgaggccgtggtgaccaaaagtatgtggctgctggcgcagaactgcgaaagctttgaccagctgcagcagcgattctaccgtcaggtgaactttgacaccttctaccactgagccgcgctgctgcgggacgatgggagggggagctggcaaagccgcaggctttgactgagggagttgcgtcaaacgcaaaagcagccagaccgggcggtctggctgcttttctgcttataaaaatattttactctacctcttcatccgcgaagatccacagcacctcgttgatatgggagccgctgcgggagtatggggtcacacggatgcagaagctgcggccatccgtcttgcggtagcggtgctccagcaggttgctgctgaacacggtgctgcgcacaaggccgaaatcgaacaactttgcaaagttttctctgtcctcgggcgctaccagcttgtcgcggtagttggtcaacgcagcgcggaaagagccgccgcaggtgtccagaacggactggaagtcgtccggcacaataacggggcgcacggtgtcctcctgcaagtccaccacgattactgtcttgtacttgggggcaagcacctttaaaaagtgctcggcatcccgcttttcctgcagggtgcgctccatcttttcattcaggccttccagctggcgggcgcggccgttgtggtcgtagtaagcctgccggtcctgccgcatggcagcctcggccttggcgacagcttcgtccagatggcgcaggtcggcggtctgctggatgcctacggaaataacatagtccttttccttcaaaaaggcgcgcatccggtccgcagtgctccacacgctgtaaggcggctcgttgggggtcaggatgacaaattcatcgctgccgatgcggtacacccggctggtggcaaagaacttgcgggcggcatttgccagacagcacagcagggtgtcgccgctgcggtgacccagatgctcgtttacctcgtgcatcccgaccacatcaatgtaggtgcacaccacggattcgtacccgctgttgggcagctcccgcaggtcggcttcgtaccggctgcggttggcaaggccggtcagggtatcgtggctgtaagagaagtccagctcctcgctgagctggtcggcctgtgcgtcgttgcgcaccagcacagtcgcccacgggttctgggcacagcagccacggcagggcagcacctctgtggtgacccagatatactggccggacacgttctcgcggtagcggtagaactccggcgcagtggcgtggtacagcacagagcgcaaagcttccagatcggtctgctccaagaacaggtctgcgtcctcctcgtgcacgatcttctcgttcaccagacggtcgcagtagttgacaaaatcctcttccttttccagatctgcacccagcaggcgggcgtcccgcttgatcacccggtacgcaccggtggcaaggttcagcagcgcgatcaccagcacgttatcggtaaagatctggtaggcctgcaaggccagcgcagtcttttcggtgcccgggttctccacccggcggtcacggcgcatcaggtcgcggcgcagatcccagtaatcctgattggtgggatctgccagcagtttttcggcgttttccaccggcatgggcttgaagaagtagtagccctgcgagtacaggcagtctgccgcctgcagcatggacacctgctccggggtctccacaccctcggcgatgatgggcaggttcagccggtgtgccatatccaccaccgactccacgatctgcacgcccttgctgcggttctcctgattcatgtcgatgagcttcatgtccagcttgatggcatcgacgttggtatccttgagcatattcagcgaggaatacccgctgccgaagtcgtccatcatcaccgcaaagcccttgcggtgcaggccctgaatggcgctttccaccatctgggtgtcctcggctaccatggtctcggtgatctcggccagcaggagctttggctccagcttatatttttccaccagatctgcaaagatctgcggcacatccaggttcaggatatcctgcaccgaaacgttcaccgacaccggcacaaggttgctgccgctttcctgccacttctgcagggtctggcagacagattcccagatgtactggtccagccttgtcacaaggccggtgcgctccagcagcggcatgaactcggcagggggaacacagccccgggtggggtggttccagcgcaccagcgcttccatacccacgatggcgcgggtgatgctgttacacttgggctgcaaaaagaagcagaattcgtggttatccagtgcgcgctccagctcgcccagcagctgctgctgttctttcagctcgttgagcatggtgggctcaaagcggtgcaggtagccgctgtcggtcgttacaccggcgatctgcgcgtagttgcacagggtggcggcatctgcaccggggtttgcctgcacagggcacacgcccattaccataaagaaggtgacatcctgccttccggcagccatgcaggcctgcagcgtggcaagcacggcggtctgctcggccttttcgtccggcaggcacaggaaaaagtcatcgtttccaaaatagcccacaggatagccggtctgcctgctgtaacccagcagacagtttgccacagtttccagcagagcatcgcccttttcggtgccgtaaagctcgttataaagcttgaagtgctggatatccacagcggcaacagcccattctgttccctgatgcgcggtcaggaatgtatgcagggcctgtaaaaatgcgtccttgcggtcgatccgccccaacgcagcagatgccggtgcggcggcatctgttttggtctttcgttcctctgacataacgattcctcacaatttggatagtttcaatacggataagccgattgcggtcggtttgtatactttataatcagtataacacggtttaagtcgttttgaaatagttttttcacactttttaacaacattattcgagcgaagtgcaacaaaaatgccacacacggcggagccggtgcggcattcggggtcatttggtattcttgttgtcgtccttgttttcctgttcggcgcggtgcagcatctcccgcaatgtgggcagactgcgcagcttgctgccgtgccggagcttcgggtaggcacgcagcatacggcgcgggcccacgatgcggggggtgcgcagcagctgcgcctgcatttcctcgctgcgggcttgcagctctgcggccagctgttccaattgcagcagctcggcggcgcgctcggcagtgcccttggcagcaaggcgggcggcgttggcagcttcggcagcgttcaggcgggcgtcctcgctggcgcggcgggcagcctcggtagcctcggcagccttggcgcggatggcagccatggtctcacgggcagaggggcgctttccggcagcatcccgcgcttcggcggcggcaagcttgaattgcagccgtccctcgtccagcttcttgtcggcgttcagggtggtggtgcccagcagctgggtcatggcatcgctgacggcgtggatactgtcgcccagctgctccatggtgtccagcgtatcggccagcgcagaagcagcaatggcggtagccaccacgtccaccgcatatacggcgtacaaaaagcacatgaggataacccccacaaagggcgggatcaggtctacaaggtcagccaccaccgggtgcacgatacgcatgaccaccagcgtgcccacaccccacagcaggcagaattccagacagatatagcccccgatgttaaagggaaaatcgctgtaatcccaccagcgagtgtggtagatcttatacagcgcccagccgcccgccagctccagcgcactgggcaggatgacgccgcctatatacagcagcaggatgctgtgctgcaagggcgtaagggcaaacagcacgatgatcatgccaaagccgtagatggggcagaccgggccgttgagaaagccccggttcaccagctgaccggtggtggcggcagcatagatgacctccagacaccagcctatgcaggaatagatcaggaaataggccagaatatggtacagcgaaaagccgcataccacggtatcggtaagaaagcttaccataggcacctccgttcttcagttctgtttggatacaatcttatattcgtcccccggctcaaaaaagggacaggcagcggtattgtgcgcaagatagcgtgccatctcgtcctcgtccagcgcagcgccctgcgcgcagtaatagctgccgcattcgtcctgaacattattcaggcacagctcacaggggtcagacatttccttcgccttcctgcgtggcggcttcggcagcggcagcttcgcgtgccatccgcttgagcaccttggggtctacccatgtcacgctgtcggcaccgggctttttgcgggcaatgagcgctttgattttaattcccatctcggtgaacataccctcgtgctcggtgcggatgttccactccggctcgttctcgtgcaaatcgtaggtgatccactcgatgtcgtagccggaagcggggaagtactccacgctgtcccggaacagatcatcatcgtcggtcttgaagtagatctcgccgccgtccttcaaaaactcgcggtaggcgatcagctggcgcggataggtaaggcggtgcttgtgggaggagtcgttcttgctccacgggttgcagaagttgatatagatgcggctgacctcatcctccggggtgatgacgcccttgatgcgctcgatatcggtgctcatgatcttgacgttgtcgatggggcgtccggctgcctgataggcggcctcgatcttgcgcttggcaaggatgagcaccttgtcggtgatgtcgatgcccagatagttattttccgggtgggcgcaggcaagctgagagatgaagccgcccttgccgcagcccaactccagaataaagggctgctccgggcgggcatactggccgtgccacttgccgccccagatgaggggttcgtgcacatggaaatccgcggccatcagttcgtcgtgggcatagggtttgaaacgcattctcatagtttgttgttctccttcaaaaatctctccacctgctccggggtggcggcgcagctgccctgacagatgccgggcttgccgccgccgcgtccgttcagggcggcattcagtgctttggtcagggcgcgcacatcgccgtcccgccgggcaaggcagtagccggtgcccttttcggtgggggtcagggcggcgcacaggccggtggtggcttcggtcagacggacagccagccggtgcagcccgtccgggtccagccccggcagggtgcggatggcatccgcatcgggtgcggtcagctgcgcaagggcgtcaaacagctggctgcacagtccaaagtgtgtaaacttgagtgcagtatactcatcgtagacccggtgcaccgccacagcggtctggtcggccttggcagagagcagcgcaccaatctccgcctgccgggcgcgcatggcctgcgccgccgccagcgcacgggcaccgcacaccacgctcagccgcacgccccccttgtagttctcgctggcaaggatcttgatctgccccacctgaccggtggtgcgggtgtgggtgccgcagcaggcgcagacgtccgcgcccgggatggtcacgatgcgcacctgcccctcgatctcttttttagagcggtaaacaagggcggcaagctcctcccgggtggggtagctgatgagcaccggcacatcctgccacacgatgcggttggcggcaagctctgcctgccgcagcccctcggggctgatgggcacactggtgtccatgcgcaccacctcggtgcccacatggaagcccacattctccgccccgaacatctggtgcaggatgccggaaaggatatgctcgccggtgtgctgctgcatcttatcgaaccgccagtcccagtcgatgcagccggcaacggctgcgccgggcgcggcggcagcgggcagggcatccactgtatgccagatgacgcccgcctgctcgtggacgtccgacacccgcagcaccgtgccgtccggcagggtcagagtgccccggtcggcgggctgaccgccgccctccgggtagaacaccgtgccgtccagcgcaatgcgcccgccgccggtcttttcgtccggctctgcggcaaggatgacgctttcgcattcggtgcggaaagcgtcctgctcaaagtatttttctgtgcgctgcatcgcgcgagtacctcctgtatatagaacgattgacaatagtggtaagagtctttgccaagggatgttctcttttgacaccaaaagagaaccagaaaagtgcattgcgctccgcggggtgactttctgcttgttttcagcgtgcaaagacgctccgctgggccagagggagttaggctcccccttgggggagctgctgagcgcagcgaagctgagggggtatcccataaaaaccagtataccacgatttttgcctgtggaaaatagtttacagttatgttatgataggaaacaacgaatattcccgaaaattgacagcgaggaaggtaacggatcatgcgtgaaagtggtattctgatgccggtatccagtctgcccggcccttacgggatcggctgctttggcaaggcggcatttcaatttgtggatttcctgtctgcagcaggacaaacgatctggcagctgctgccgctcagccccaccggctacggcgacagcccctaccagagctgctctgcctttgcgggcaacccctattttgtggacttggaagcgctggaaaaagagggcctgctgaccgccgcagacctcaaggcggaaagctggggcaaaaacccgctggaagtggactacggcaccttgtacgtcagccgctttgcagtgctgcgcaaggcctacgccgcatggcgcagccagtgcgccgggctgcacggctgcacctactactaccccgacgactactacgcctttacccttgccaacgaggactggctggacgactacgccctgtacatggcactgaaaatagccaacaagatgaagaactgggtggagtgggatgccccctaccgccgccgcgacaaggctgcactggccgcctttgccgccgcaaacgaggaggagatcggcttctggaagtttgtgcagtacaagttcagcgtccagtggcaggccgtcaagacctatgccaacgagaagggcgtgcagatcctgggcgatattcccatctacgtttctgccgactcggtggacgcatgggtgggcggcaagctgtttgagctggacgccgacggccgctttgcccgggtggcgggctgcccgccggactacttctccgcagacggccagctgtggggcaaccccctgtacgactgggcgtaccacaaaaagaccggctacgcatggtggatccagcgggtgcgccacgcactgggcatctacgatctgctgcgcatcgaccacttccgcggcttcgacacctattgggccatcccggccaccagcaccaccgcccgcaccggcaagtgggagaacggccccggcatggagctgttcgacgcactggaagctgcactgggcaagctgcccatcattgccgaggacttgggcgagctgttccccagcgtgcgtaagctgctggccgacagcaccttcccgggcatgaaggtgctgcagtttgccttcggcggcggggacaacgagtatctgccccataaccacgtcaagaacggcgtggtctaccccggcactcacgacaacaccaccctgaccgactggtgggagaacggcgcttccgaaaaggaaaaggccaccgccgcggcctatctgcacctgaccccctgcaagcccaccgccaaggaggtggcagctgtcaagactgccgccgcgcgcactgcgctgctgcgggcagcgctgggctcggtggcggacagagccatcattcccatgtacgactggctgggtctgggcgccgaagcgcacctgaacaccccgggcaaactgggcggcaactgggcatggcgcgccaaggccggctttgactccaaaacccttgccgcacagatcaaagccgagtgcgccgtgtactgccgctgcaatgcagacgttcaaaacgtgaaagaattagcaatttgacagaattgtaaaaactgccgtaaaaatttgtgcgttttgctggaaaaatctgtatttcaatggtataatagccgtaagttcccggatttgtgggaaaattggaatttcgcccgtcggaagcggcggcgcgtactgatgatggggaaattacagatggacagagaatggacagagcaggatctgcgtacctttgccgagggtgcacaggctgcgtttgaaacggtattgctggacgagctgccacaggacaccggctggcaggacgaaggcctgcaggtgagttatagcctgtgcaacggccgggtaagctgcgtactgcaccgcacggtgcgggcagacggcaagctgtggcggatcaccatgtctgctccgctggcaggcaacctgctgccggaggagcgcatgagcgcccgcgagcgggaactgtgccgcgaggacctgaaccacgattttctttccggcgtgtacaaccgccgctatctggagaccgtgatcgccgccgagctggaccgctgggcagagcaggggcgcaaggccgctgtggcgctggtgtcgctggatcacggcgcacagctgcgggacacctacggtcagccggtgatggatcagctgatctgctttgtggcaaaccagtggaaaaagtatttcgacatcccgggcagtcagatcgtctgccgcctgaccggcaccacctttgtggtaggctgtctggacttggacggcggccagctggccgagcagatgcggaacatttacgccgaaatgccccacgagtgcatcacctccatgggcatgatgaagcgggtgccctttaccctgagcgtcgcagtggcagggctggacgagctggacagcgccgccaactgctggcagcgcctgtacgctatctgtgacgagcggctgcgcggcatccagatctccggcggcaataagatctgctgagaaacaacgtataaaatcccccttcgggcacatactaggtgccaaagggggatttttttgtatggaaaaccagaaaaacgataacctcaacctgctggaggcggtggtgcagaacaccgagatgggcaagaacaccttggagcagatcttacccatgaccaacgatgtgcagttcaaggccgaactgctgcgccagcgcaatatttatcaccagctgaatcaggaggcgcacaccgccatcgaagcctgcggcggcagcgcacaggggcagagcaccatggcaaagctgaacacgaaaatgggcatcgggctcaagacccttacggacaaatccacccgcaatctggccgaaatgctcacacagggcagcggcatgggggtggtggactgcgtaaaaagctgcaaggactaccccaacgccgccccgggcgcaaagcgccttgcccagcggctgcaggattttgaagaggataaccgcatccagctggaacggtttttgtgaatacgttccaccccataaaaacacaaagtcgggcagcccgcaggctgcccgactttgctatgatctaaatatttttccgctattgcgaagcatttactcccacagtttttcggggtactggccctcggcggtcttgcgggcaatggcctccaccaccaaaggcttatcctcccggtaggtgacgccgaaccacttatccgtgctgcgcagcacctgaatttttgccttgttctcctcgatcagctcggtcaccaccagcggcaggaaatactcgcacttcagagggttcaccggcagattctcggtcagccagcccgcaaagcgctgctcggcctcgtccagaaagcttttgccgaagccccacaggttcatgctcacaggggtgtcgccgggcaggtccacccagctctcgccgccgtcctcggtgtaatgtgcgccgccgtcgcagggctcgatgcgggtgcgctcggtcacgctttgcagggtgccgtcctcgttcttgatgcacacgccgcgtgccacgctgccgttctcggacagggtgttcttcagcagatagctgaccatgcagtagcggtagaaatcatcatcggcgtgggtggacaggtaatcgtacatcacctgaaacgcctccgggccgtagtagtcgtccgcattgatgaccgcaaaggggccgtcaatcaggggctttgcagccagcacggcatggcaggtgccccagggctttacacgtccctccggcacggcaaagcctgcgggcagctcttccagctgctggaaggcatacttcaccttcatcgccttggccacacggtcgccgatggctgccttgaaggcgtcctcgatctcgtgcttgatgacaaagatcacggtctcaaagccggcgcggcgggcgtcgtagagggaatagtccataatgacctgtccgttggggcccaccgggtcgatctgcttcatgccgccgtaacggctgcccatgccggcagccatgacgaccagtaccggtttattcatctgcaattcctcctgtatctgccggggtttccggcattgtagcgttctgaggctattatacactgcttcgccgccggtggcaaggcacagaaggggggagaggatcagaaatgcgcgccgcgtgcgctttgcgcatattcagcggaaaaattcttttttaatagcgcaatgccggagcgtctgcggacgctccggcattgcattttcacgggagagggcgcggcagggcagctccatctatgaaaaaggagatcggaaacgcccgcaggtgtttccgatctcccaaatcaaactgtttttccgctcaccccagctggctctgggtcagggacaaccgctggtaggcgatgcgcggggtgccgtcctccacatggatgatgccgcagcgggtaaagccctcgctttccagcaggtgctgcatcaccttgttgtcggcgtgggtgtcggcgcgcaggctctcgcagtgctccagacaccactccaccaccgccttgccgatgcccttgctctcgcccgccgaagccagccggtgcagcgtaccgtagggcaaagtgtcgttgagccactgtccgtcctcaatgaccttgtaagtggggtcctcgccaaggataaaggcaaacaccgcctgcatctggccgtttaccatgtacacgaacagccggttggtgtcgatatcctcttccagcagctccgggcttgggtaattgtccccccactgggtggggttgccgtttttcgccatgaattcccgcgcatgggcatagatatccaaaatccgtgccatatctgctcttaccgctccgcgaaacatatccactcatcctctcttgcccgcgccctgctgcgcggggtgcatttattttagtataacacaatattccataaagtaccagaattttctccatttcgcggcaaaaacagaccgccgtgcgcggggcggcagcacgacggtcgggggaagcaaagcagggggcagttcatgcggtggggcggcggggagcggcgccggtgcgcaccagccggtactcccgggggctcaggccgtagcgctcgtggaacaagcggtagaagtagctggtgttctcgtagcccacctgtgcaatgatctgctggatgttcagatcgctgcggcgcagcagccgcgcggcggtctccatgcggtgcttttgcagcagttccttgtaggtgcgcccggtctgagcgcgcacgcactcgctgacatacgccagcgaaacaccataagcccttgccacattggaaaggctggcctcacgataattttgggtgatctcctgcagcgccgcctgcaccagtgcatcgcggctcacggcctccatgcgggcttgctgcggggagcgttcaagctttgccatcattgtatctgtcctccgtaacggtgcggcaggcgggggactgggggaagccggaccacccgccgcacgataactgcggagccccttccgggctcttataccctgaatacgaatcacccgccgcaaacattgcagaaaagataaaaattttttagtcaattttcgttgtagagggagctttcccacagaaaaaggctgcccgccaaacggcagacagccttttccagaagaaaataaggaaaacacgtgcccaaaagggcagagtgagtatcagaacatgctttcatccttgtagcgcccggtgcgcacgaactgcacccactcggctacattcacggcgtggtcgccgatgcgctccagatacttgatgaccatgagcagatccagcgccgcgtccaccttggcggggtcggcggcgatctcctgtgccagcgtgtgcttgatggcgttgaagtcgtagtccacggcgtcatctgcggcgatgacgcggcgggcggcgatctcatcctcggcggtcagggcgtccatggcgtctaagatcatctggtaggccttgcgtcccatggcaatagcctgactgacagcggggtctctctccttacgcacggtgacgagatgtgggatgatctcggcgatatccgaggcgtggtcgcccatgcgctcgatatcggtgaccaccttcatggcggtagaaatgtggcgcaggtcgcccgccaccggctgctggcgcagcagcaaggtcatgcagcggtgctcgatgtcccgctccatgttgttgatgcggtcatccccctgcacgatcttctgggcggctacggtgtcggcggtgcacagcgcttccagcgcgttctccacagcctcggcggcgttctgccccatctccaccagtgcggtcttgagggcttccagatcgctgtcgtattgtttgcgaatgctcattgctttgttcctccctgcattaaccgaaccggccggagatgtagtcctcggtgcgcttgtcccggggtgtgctgaagatctggttcgtggggccaacttccaccagttcacccagcaggaagaaggcggtgcggtcgctgatacgggccgcctgctgcatattgtgggtgacgatgaccacggtgtagttctttttcagctcgttcatcagctcctccaccttcatggtagagccggggtccagtgcgctggtgggctcgtccatcagcagcacctcgggcttgaccgccaatgcccgggcgatgcaaagacgctgctgctgcccgccggacaggccaagggcgctctttttcaggcgatccttcacctcgtcccacagggctgcgccccgcagagaggtttccaccagctcgtccagctcggccttattgcgcacgccgtgcagcttggggccgtaggtgatgttgtcgtagatgctcatggggaaggggtttgccttctggaacaccatgcccacgcggcggcgcaggtcggtcagctccatctcgcgggcaaagatatcctcgcccttcagccgtacatcgccctcgatgcgcacgcccggcacaaggtcgttcatgcggttcagggtctttaaaaaggtggactttccgcagccggaggggccgatcagtgcggtgatctcccgctcgcccacatccagcgaaatgctcttcagcgccttgaagtcgccgtaccagaggttcagatcctttgccgatatcaccggcacattcgtgttttccatagagtacctctttatttttactgcttctgtttcagtttcgttttcgccagacgtgctgccagattgatgagcagcaccagcaccagcagcactgcgccgatgccccatgcagaggtgaaatcgccgtcctcaaaggcgcgcaggtacagcagcaccgaaagggtagcaccgttggaggtgtaggccttgaatacgctcttggcgatcacctctgccgcaccggcggtgaacagcagcgcggcgctttcgcccacgatgcgtcccaccgccagaatgcagccggtgacgatgccgtcaatgctgcaaggcagcacgatggtgcggatgatgtgccacttgcctgcacccagacccatggcaccctcgcggtagccctgcggcacggttttgagggattcctgcgtggtgcggatgatggtgggcaggttcatcaccaccagcgtcagactgccggacagcagacaggtctggaagcccagcgcctgactgaacaccagcatacccaccaagccgtagatgatgctggggataccggccagcgtttcgttggtgaactcgatgacctcgatgagccgccggttggaggcgtattcggtcaggtagaccgccgcacccacgcccagcggcaatacgatgagtaatgtcagcacaatgacatacaaggtgttgaggatggcgggcagaatgccgtccgtctttttcagcacactggcggtggtagaaaggaagttccagctgatgtgggggatgccccgcaccagcaccatgccgatgatcccggccaccagaatcatcaccagtactgcgcttgcccagaccagcacggtcattacccggttccatgcccggcgggaggacgaaaagccgttattcatcgcggttgcctcccttcagtaccacattcagcaccacgttgataagcatgatgaacacgaacagcaccagcgcgatgctgaacagtgcctgccgctgcaagccgccggcgtaactcatttccttggcaatggcggtggtcagcaaagtgacgctgcggaacaggctgtccggcatattggggctgttgcccgccaccatcatcacagccatggcttcgccgatggcgcggccgatgcccagcacaacgcctgcggcaatgccgcttttggctgccgggatgctgatcttgaaccatgtttcggtgtcggtggcacccagcgccagactgccctgctcatactccggcggcacggcgttgagcgccgtcaccgacacggacacgatgctgggtaagatcatgatggaaagcaccacaatggcgctgagcaggcaggcaccggaggccttgccgaaggtctttgccacggcgggcaccagcacctgcatacccaaaaggccgaacactacgctggggatgccggacagcagctcgatggcggtgaccaccacggtgcgcagcttggggtctgcggccttggagaggaacaccgccgtcagcaggccgatgggcacgccgataatggtggcgcccagcgtgccgtagacactggacaggatgaagggcagaatgccgaacagcggctctgctgcggtggacgcccattttgtgccgaagaggaacttgaaaatgccgattttatggatagccggcacgccggagaccaccatgtacaccgagatgagcaccacacagcacaccgccagcattccgcacaggaagaagatgaaattcatcaccgcttccagccagtcggcgggggtgcggggcaggcgtacccggcgcagagaagaggttgtatttttcataacgcgatcctataaaaagccgcaccagcccagccttttagggcaggccgacgcggcagttctcttgttcagatgcagggcaggcggttcaccggggagctttccccgcgaaattcggggcttccagctcccgccctattgcctgcggcaacagggtcccaccctcggatcattcgctggggaaactccccggcaaaccacccggcaattactcgttcacgggcacagcgcctgcggtgcggatgaggtcggcagcgtccttgctggtggcaaagtccacaaaggcctgtgcctgctcagacagggcgacgctcttgttggtgacgaacacgaagggacgctggatcttgtagctgccgtccttgacggtgtcctcgctgcactccacaccctccacggtgaccatggcaacggtgtcgcccacagcggacagggaagcgtagccgatggccagcgggtttgcctccacagcgctgatgacagcgccggtagcggtcagctcctgtgcgtacttgcagctgtccttcacgtccacgatgctctcaaagccatcgcgggtgccggaaccggcctcacggcccaccagaacgatctcgccgtcatcgccgccgacatccttccagttggtgatctcgccggtgaacatcttcttgagctgctccacggtcaggtcagcgaccttgctgtccttgttcacgatgatggcgatgccgtccagcgccacgacagtgccgtccacatcgttcttctcatcatccttcagggcacgggaggacagaccgatgtccagcgtcttgtcggtagcgccggtgatgcctgcgccggagccggtggggtcgtagctgacggtaacgcccggctcgacctcggcaaagccctcggtcagggcggcgatgacgttcttcatggaagtagaaccgccggtcgcaacgttgccgctcagggtgcctgctgcgctctccgcagcagaagaagcggtggtggaagcagaagcagcggtgctggatgcggaagaagcagagccgccgcaggcggtcagggcagcagccgcagcagctgcaccgcaaacggtcagaaacgaacgacgagagatctttttcatgatagaatttcctccattaaaaacccgggctcccgcccggcactgtctttttgtgttttccttgggaacggccttattctaccgctttgccgcccttgctgcgaccatggacgtgcaaaaagtgcgtaaaactttgtgcacaatgccagccccaatgtaaagaacaggtaatgcggcacaaaacaaaaagccgccggacactcctgtttccagaagtgcccggcggcgggatgtattcggttttactctacgcggcccgttacatttttgccgttatttccatagaggaatacagcggtttgaccattgtagcgcacacgcagttcataagtgccggtgctgttcttttccggcacaccttccttagtttccagatagaactcctgcgagccattgtagacggccgtctgccccggctctgcgaccagttccttccgcttgaaatacagcgtttccttggtgtccgcctcccggaagatgcaggtaatgtcctccggcttgataactaccctttcggcgctgttgttctggatggtgaactgcgtcaagtaggtcagctgcttgactatgccgtcgcccaagccgccgcccggaaacggcattgcgcagataaaggtgacatcaccgatcttcgccacgccgctggtcttttcgatcacggtatccccgcagccggtcaaagcccctgcggcggtcagcaccagtgccccggcgctgagcttgagaaatgttctgcggtcgatcatagcaatgcacctcctgtattgggctgtttgggttcaattatgcaagtttggaatccttcttaaaggtatagccttcataaacaccggtataggtctcggtgggatcaacgccaaccctaagcttgatatctgcggtttgagcttccattgcctgatagagatttttctggctctcatccagacggaaggtcagaatgcccgttttgcgctcgccctttttcatgaccagcgtgatattgctcagcagatctccaccctgcagcgcgactttctggccgtcgatcttaagcacaaacacggattttgcggggaaactgaagccattggaatcatccagattatgaacgcgcacagtcactgcgaaatctgcataccaggatttcccggtacctatgccctgatcatgagggacagcgctccatttacccacatcaaccgtaaaaccacccagatcggtgccgccgtcactatcactgcagccgcccagcagtccggtcatagatactgccactgccattgcggcagaagtctttaaaaacgcacgacgatctattttcatagccatattataagccctcctcaaaagcttttttgcaccctaagagtaccacattttaccacgttgtcaactatccgaattcaggtttcaccattttatcgttcctttataaaaggccgcatagaacggcagcgggcgcggtgtttgctgccggtccggggctgcggtggaaaaatttacttttttcgaacaaaatcaaaatttgctgttgacaaagggcacccggtatgttaaaatagccaagtcgggtgcgaacacctgatgcaaaatggacgtatggcccgttggtcaagcggttaagacagaggcctctcacgcctttaacatcggttcgattccggtacgggtcaccattttatagtagtaaaacggctgtatgccgttttatatagatgcctctttagctcagtcggttagagcacctgactgttaatcagggtgtcgcctgttcgagtcaggcaagaggcgccagcaaagcgatggaaattttccatcgcttttttctttttccggcggccttgttgacagcaccgccccggggggctatacttaacacactataaagtataaaaggaacctcttgccacgcagctttacggtgcagtaaggcgaaaaggcgccctcttgggggagctggcaatgccgcaaggcttgtcggagggggtcaaatccttgacaaaggagaacatcatgaaaaaagttattctgaccggcgaccgtcccaccggccgcctgcacgttggccactatgtcggctctctgaaggagcgggtgcggctgcagaacaccggcgaatatgacgagatctttatcatgatcgccgatgcgcaggcactgaccgataacgctgacaacccggagaaggtgcgccagaacatcctgcaggtggcgctggactatttggcctgcggtctggaccccaacaaggtgcacatcttcatccagtccatggtgccccagctgaccgagctgagcttctactaccagaatctggtcaccgtcagccgtttgcagcgcaaccccaccgtgaagagcgagatccagatgcgcaacttcgaagccagcatcccggtgggcttcttctgctaccccatcagtcaggctgccgatatcaccgccttcaaggctaccaccgtgcccgccggtgaggatcagaaacccatgatcgagcagtgctgcgagatcgtgcacaagttcaactccgtctacggcgaaacgctggtagagccccagatcgttctgccccagaacgccgcctgcctgcgtctgcccggcattgacggcaaggccaagatgagcaagagccttggcaactgcatctatctgtccgaggagccggaggacatcgagaagaaggtcaagtccatgtttaccgaccccaaccacctgcgcgtgcaggaccccggcaaggtggagggcaacccggtgttcatctatctggacgctttctgccgccccgagcactttgccgagttctggccggagtaccagaatctggacgaggtcaaggcgcactatcagcgcggcggtctgggcgatatgaaggtgaaaaagttcctgaacagcgtcatgcaggctgagctggagcctatccgcacccgccgcaaggagtgggagcagcgcctgcccgaagtggtagagatcctgaaggagggcagcgcttacgccgaaaagaccgctgccgccacgctggacgaggtgcgcaaggccatgcgcatcgactacttcgagaacgataacctgctgaaataatatttatgagagaacccgaaacgcctgcggcgtttcgggttctcttttgcatcgtttacgaaaattgcatagaaagcacgggcaaactatgctaaaataagggcaacaagtacagaaagccccgtttgggggcgaaaaaaggagaaccaccatgcaaaagaccatctggatcaccggagcaagttccggcatcggccgggagtttgcccgccggtatgccgctatgggctgtcggctcatcctgaccgcccgccgcgccgaccgtttgcaggctctcgccaaggagctgcacgcagcccacggcacggaatgccgcatcgagaccgccgacctctcccgcgccgaggagtgcagccgcctgtgcgaagtactggccgaggagcacatcgacatcttcatcaacaacgccggtttcggcgtctgcggcagcattctggaaacggaggaagcccgcgaggaagagatgatccaagtgaatgttgccgccatggcgcggctgttccgcgccgtggtgcgcaagatgaacgcacagggcggcggcaccatcctgaatgtggcatcctctgcggggctgctgcctggcggcccctatatggcgggctactacgccagcaaagcctatgtggtcagcatgacccgcggcgtggctgaagagctgcgggagatgcacagcccggtctacgtctgcgccctctgccccggcccggtggacaccgagttcaacgaccacgccggggtggtgtttgccctgcggggcattacccccgagctgtgcgtagaggaggccctgctgggcatgatgcaccgcaagaccatcattgtgccctctgcctttatgcggctgtgcaccagcgcccagcgccttgtacccatccccctgctgatgcccatcgtggcacgccagcagaagaaaaagctggggtaaaagacaaaggtcgtccaaacttgtcaacaagcccaaagatagtcggaatatcttgtgcaccgtgacaaggtgcggcggtctgcacaagctgttgcgctaaaaagcaacggttctgcgtattgttttttggcagaaaagcaaaaatctaaagaaagtacaacaaaacttcacaagaatgtgccttgacacttcctgtaaaggatgctagactggtatacaagtaagagcgcactccggcacggccggatacgacgcgctttgcaaagtagcacggctgcaatttgcgccgtgtagaatacgatttttgacaggaggactttattatggcacagtgcactcccaaatcttttgacctgaccggcaaggtggcgctgatcaccggcgcatcctacggcatcggcatggcaattgcaaaggctatggcagccaacggcgctaccatcgtgttcaatgatatcaagcaggagctggtggacaagggtctggcttcctatgcagaggccggcatcaaggcgcacggctacgtctgcgacgttaccgatgaggacgccgtcaacgccatggtggcaaagatcaccgaggaagtcggccacatcaacattctggtcaacaacgccggcatcatcaagcgcatccccatgaccgagatgagcgctgcccagttccgtcaggtcatcgacgtcgacctgaacgctcccttcatcgtggcaaaggccatcatccccgatatgatcgcacagggcggcggcaagatcatcaacatctgctccatgatgagcgaactgggccgtgagaccgtttctgcttatgcagcagcaaagggcggcctgaagatgctgaccaagaacatcgcttccgagtacggcgcttacaacatccagtgcaacggcatcggccccggctacatcgctaccccgcagaccgcaccgctgcgcgagatccagcccgacggcagccgtcaccccttcgaccagttcatcgttgccaagacccccgcaggccgctggggcgaggccgaggatctgggcggacccgctgtgttcctggcatctgaggcctctgactttgtcaacggcctgatcctgtatgtggacggcggcattctggcctacatcggcaagcagccccagtaaacgctgagggcactccgcagttctgaccccggggactgccgcacagcgttgtgtggcagtcccctttgcatttgtacgggaaaggatgttatgctataatggaaaaagcacatcaggacatcccttgggtgccccatgccgaaatttccccggagccctgcggccccggggtgcagcgccgcgtgctggcttacagcaaggacgccatgtgcgtggaaaacacctttgagaccggcggcgtgggtgccatgcactgccacccccacacccagatcacctatatcgtctccgggcggtaccgctttaccatcggggacgagacccgggaggtaggccccggcgacaccctgctcaagcagaacggcgtcatgcacggctgcgtctgtctggagggcggcgtgatgctggatttctttacccccatgcgggaggactttgtataatccctgcgcaccgcagggaaaaataagaaggagaaccattgttatgaagatcgcacttatcaacgagaacagtcaggccgccaagaacggcatcattgaagccgccctgaagaaggtggtggagcccatgggccacgaggtggtcaactacggcatgtacgccgccgacgatgctgcacagctgacctatgtgcagtgcggcattctggctgctatcctgctgaacagcggcgctgcggactacgtcgttaccggctgcggcaccggcgagggcgccatgctggcactgaacagcttccccggcgtcatctgcggccacgttgaggaccctgtggatgcctacacctttgcccacgtcaacgacggcaacgccgttgccatgccctttgccaagggcttcggctggggcggcgagctgaacctcgagtactgctttgagaagctgttcggcttcggccacggtcagggctaccccaaggaacgcgttgtgcccgagcagcgcaacaagaagattctggacggcgtgcgcgctgccaccttcaagcccctcatcgagtgcctgaagagcatcgaccaggagctgctgaagggcgctgtggccggtgcaaagttctctgagctgttctttgcctcctgcaaggacgaggagctggccgcttacgtcaagaccctgctgtaagctgcggaggagatcatgcaaggactgaccctgttcaacctgaacctcacccacctgctggatgcctttctggaaactgcagtgcccatgatcgccggtcttgccgaggtggtgggtctgttcatcatcatcaccagtctggccaaggccactttttactatgtccgcgccaccttcttcaacgaccaccgggacttccaccatgaaatgagcagcggcctgaccaccgcactggaatttctgatgtcggcagagattgccaagacctttttgctgcagaatctggagtccgtggtgccgctggcggccacctttgcgctgcgcgctttgatgagtatgctgctgcactgggagatggagggcggccaccgcccggccaacgccaaggaaaaggacaagtccggcgctccgaaggacggcaaaaacggctgacaggcaaaagatttgccaaactttagcacggcagcgtttcaccgtgttgtgaaaaacgtaaaaccttgagatgaatacttgacaggtttgctcaaagagactatactcgtgccatcgaaagcaaaggcgctgacggaagcaattccgccagcgccttttgtgttttcggggatactgccgcacggagagaatagagggctccccgtgcaaaaaacgaccgtaggaggtaggaaagtatgttcagctccgtcaacacctgctggacgctcgtgggagcgtttctagtgtacttcatgcaggccggattcgccctatgcgaggccggcttcacccgggcaaagaacaccggcaacatcctgatgaaaaacatgatggatttctgcatcggcacgccctgttactggctcatcggcttcggcctgatgttcggcggtaccggcgcactgatcggcggtttcgatcccttcattcagggcgattacagccatctgggtctggatatccccctgtgggtgtacatcgtgttccagaccgtgttctgcgctacggcagccaccatcgtctccggctccatggccgaacgcaccaacttcaaggcctactgcgtgtactccgccgccatctcgctggtggtgtaccccatctgcggccactggatgtggggcggcggctggctgcagagcatgggtttccacgattttgcaggttccgcagccgtgcataatgtgggcggcgtcatcgctctgctgggtgcatggatgcttggcccccgcattggcaagtacgacaagagcggcaacccccacgccatccccggccacaacctgaccgccggtgctctgggcgtgttcatcctgtggttctgctggttcggcttcaacggcggctcttccctgagcctgtccaccgatgccaccatgaccctgaccggtctggtctgcttcaacaccaaccttgccgcagccgttgccacctgcgtgaccatgatcttcacttggctgcgctacggcaagccggatgtctccatgaccctgaacggctctctggctggccttgtggctattaccgcaggctgcgatactgtctccccctttggcgctttcttcatcggctttgtggccggtatccttgtggtgctgagcgtggaattctttgataagatcgccaaggtggacgaccccgtaggtgctgtttccgtccactttgcaaacggcgtctggggcaccattgcggtgggtctgttctccaccggctccaacaccgcccatgccggtctgttctacggcggcggtctggcacagctgggcacccagctgctgggtctggtctgcgtggatgtctacgttgtggtggtgatgttcatcatcttcaagatcattgacaagacccttggcctgcgtgtgcccgccgaggtggagatcgacggtctggacatccacgagcacggtttggcttccgcttatgcaggctttgccatctcggatgcaaactccgctgccatgacccccaacgagaacactgatctgggcgaggacgatgtcacccaggcttcggcaaagcagatggatgctgccgtgccggtggtgcgcgaacctgtgatccatgatggcgtttacgacaccggtatgcacaaggtatccatcattgcaaagctggcaaagttcgaccagctcaagaccgccctgaatgatctgggcgtcaccggcatgaccgtgacgcaggtcatgggctgcggcatccagaagggcacccctgaaaagtaccgtggtgtgccggtggataccaccctgctgcccaagatcaaggtggaagtcatcgtctcccgcatcagcgtggacgctgtggtggaagccgccaagaaggcgctgtacaccggtcatatcggcgatggcaagatctttgtctacaacgtgacccgtgtggtcaagatccgcaccggcgaggaagattacgccgctctgcaggacgtggagtaaccctccacaagtttctccgctgttcccgctgcggcggcagcccggctgctccgacacagtccccgccgcccggcgtgacagatagatcgttttcctttttcctttttccttttttcgttcgagtcaccagtaagtcgaaagccccgctcctgcgcacaagggagcggggcttttgctgtgaaaaaaagtgccccggaaacgcctgtctgcgtttccggggcacttatcatttataccttacaggctgcgggtgcggatctcggtggtgaccttggcgatgaagtcctcaaggctcatctcggcggtctcgcccttgcggtcgcgcacggagatgttgccggcctcggcttctttggcgcccagcaccagcatatagggcacgcggtccacctgctgtgcggcacggatcttgtaaccgatcttctggttgtcgtcatccagcacaacacggatgccggcatcagacagcttctcggtcacgtcctgtgcgtactccagcgtcttttcggacacgggcagcaccttgacctgcgtgggagccagccaggtggggaacttgcccttggtctcctcgatcaggtaggccatgaagcggtccagagagcccagaattgcgcggtgcagcaccacgggggtcttttcagagccgtccttgtccacataggtcaggtggaactttgcgggcaggcagaagtccagctggcaggtggacagggtgtactcggcacccacagcgggcttcacgttcacgtccagcttcgggccgtagaaggcggcctcgccgatctcctcggtgaagtggatgcccagctcggtcagcacttcgcgcagggcctgctctgcatggttccacatggcatcatcgtcgtggtacttcttcttatcggcaggatcacgcaggctcagcacgcagcggtaatcggtaatgttgaagtctttgtaggtctcgaagatcaggtcgcacacgtttgcgacctcgctcttgatctgctccggggtgcagaacaggtgagcatcgttttggcagaagtgacggccgcgctcgatgcccttcagggtgccagaggactcgtagcggaagtcgtgggcgatctcgccgatgcgcatgggcagatcacggtaggagtggggacgatttgcgtagatcatcatgtggtgggggcagttcatcgggcgcagaacatagctctcgccctccatctccatggcggggaacatgttctcacggtagtgatcccagtgaccggaggtcttatacaggttcacagtgccgatgcagggagtcataacgtgcaggtagccgcgtgcacgctccttctccttgatatagttctccagctcctgccagacggtgtagcctgcgggcaggaacatgggcaggccgcggcccaccagatcatcggtcatgaacaggcccatctccttgccgatcttgcggtgatcgcgctcgcgggcctcctgctgctccttctcccatgcgtccagctcctcctgattgcggaaagccacgccgttgatacgggtcagcatcttgttttccttgtcgttcttccagtatgcgccggactgctgggtgatcttgaaagccttcagtgccttggtgtaggtcaggtggggtccgatgcacatatccacgtactcgccctgctggaagaagctgaactcggtctcgtcagccagatctgccatgtgctcgaccttgtagtgctcctgacgctcctccatcagcttctcagcctcggcgcggggcaggatgaagggcttgatgggcaggttctccttgacgatcttgcgcatctctttttcgatgttggccagatcctcgtcgctcagcttctggtcgcccagatcgacatcgtaatagaagccgttctcggtggcagggccgaaggcaaaatcagcctgcggatacaggcgcttgatggcctgtgccataacgtgagcagcggtatgacggataacgtgcagctcctgatcctgcgggcactcgtccacatgaccgtccttgtagatgatcttcatagtagattctcctttgacaatgtgggtttgaacaaaaataaaaagcgcttcaccccgtaaaactcacgggatgaagcgccgatcaaatgtctgcgttccacggttccacccgaattgcgcgctccccggcggggaaacgcgcccctcgcagtgctgtaacgggcacgcccggcagaggttcgcctctgcactctgcggtggtagaagccggggtcatggcaggctgcttgcagcacccggaaacccggggcagccctctctgcggcatgaaaagcggggcttcagtttgtccgcatcaatgttttggacaggatgaaactacgctgattgtagcacgccagagcaaaaaaatcaagagataacggcagaaatatacttttttatgcaccctgcttctccacgctgcgcacagccagcgcctttgcgggcttcatcagcagcacgcagacaccgttaaagagcacagagcccacgatgaaggtgataaagaactgcggcagatgggtggtcagggcagggatatcgatgcaggccacggtcaggtaggcaaagcccacgttgttcagcaccttgggtgcgtaggggtgcaggatgatgaggatgaacagcaccacggccagcggcaggataaagccgaggaaatcgcccagaacaggggtcagggcactgatggacagcagcgccgccacagtgagcaccagacccacaaggccacccagctccacagtgacaaggcgatccttcacatcaccctccagcgtgaacatcatgatgttgctcaggaagatcagccagctgtactccatgccggtcaggtggatgacggcgtttgcgatcaggatccagaccagcagcatcaggcggaagtaaagcagaaagcgcttggttacggcctcgttcataggggtgtcctctctttctcgtctgtattgacaagtgtttcttttcaaatatgcgaacattttggcaagtaatacttgcttctaacgtgataagtatacaatactttccagtaaaagacaatagtttggcaagtaaaagttgcattatatgtaaattcggcatggcaggggagccggggatgcagaccgaaggggtgcttccctgagagggttctgttcctcgtcaaaaccgcaaaactgtattttatacaaatacagttttcagggcaattttgcaaaagcttacaaaaaacgtgatttgaggcgtcaaaatgcctgaaaacactttctcttttttgccgtatatgctataatgacaactgttctcgcacaagaaacaggaaaatgtacgcgataggcgtacagtgtaagaggagtgttacgatatgaaaaccttgaaagcggttgtagcaaaatacaaccagaccagcctgatcctgcgcatcctgatcggcctggcagtcggttcggtgctggcgcttgttgcgccgggcgcgggttgggtaggcgagctgggcagcctgttcgtcggtgcgctgaagggcattgccccggtgctggtgttcgtcattgtggcgagcgcgctggcacagggctcgtccaagctggaccgccgctttggcaccgtgatctggctgtatatgctcaccacctttctggcggcagccattgcggtcatcaccagctttatgttcccggtcaaggtggtactggccgatgcggcacagtccgatgtgatcccgcagggcttgggtgaagtgctgagcaccctgctgaccaactttgtggccaaccccgtcagcgccctgatgaacggcaactacatcggcatcctgttctgggcctgcatgttcggcattgccatgaagaacatcggcgcagagagcaccaaggtctttctggcaaacaccgccgatgccgtttcccagatcgtgcgctggatcatcaatctggcccccttcggcatcatgggtctggtgtacaccaacgtttccggcaacggtctggccatctttacccagtacggcaagctgctggcgctgctggtgggcaccatgctgttcatggcgctgatcgtttccccctttatcatgttcatctacctgcgctgcaacccgtacccgctggtattccgctgcctgaaggagtccggcctgaccgcctttttcacccgcagctctgcagccaacatccctgtgaatatgtccctgtgtgaaaagctggatctggacaaggatatgtactccgtgtccatcccgttgggcgctaccatcaacatggacggtgccgccatcaccattaccatcatgacgctggcagcggctaacaccttgggcattcaggtgtctttgcccgccgccatcgtgctgagcgccatgagcgctctgggtgcctgcggcgcttccggcgtggctggcggctccctgctgctgatccccatggcctgctcgctgttcggcatctccaacgacatcgccatgcagatggtgggcgtgggcttcatcatcggcgtggtgcaggactcggtggaaactgcgctgaactctgccggtgacgtggaatttgccgccaccgccgagtatcaccagtggctcaaggagggcaagcccctgccggctttcctgaagggctgataacctggcataaacaaagcagccgctgcactttctcgtgcagcggctgctttgtttgttgtaatgaaattcacccaaacagcaccacagcgtagcttacgccgtcctttaccacataggcaacgcccagtttggtcttgccctttgcggctgtggtcatagcttcggggtaagtgccgtccttcggcaggacaaagataatgtccgaggggtcgtcggcgtccggcttccagtcaaagcccggggtaaaggtatcagtgcccagaatgcccatgcccatgttttcaaacgcagtggcgtagctcttcttctccagataggtttttacaacattgtctacatgggcccagcgataaagtttgtccttgctcgtttggcaggacggctcagtgccggcgacccagcttgcgatggtataggctttgtcgctcagctcctcgctgtagctcaccttgaatctatcgcgcagcgcctttacgcttttactttcggcgttcgagtgctcagggcccatgggtgcgccaacgctggcgtcacaggcggtgaacacggtcagcgccatcaggccgaccagcaggcaggccagtaatttcttccagtttttcatagaacgatgctcctttccgttccggggtcgttgcgggtctgcgtccgcacggacacagttctttttgctttcttctgcatccatgatacctttttttaacaggaattgcaatcgttttggcgcaaaaaaacaggctgccgtgcaaaaaacacggcagcctgcggaaaaagctttattttgcgtactccacagcgcggctctcgcggatgacgttgaccttgatctggccggggtaatccagcgtatcctcgatctttttggcgatagcgcgtgccagcaggatgacctgatcgtcgctgatgacgtcgggcttgaccagaatgcgcacctcgcggcctgcctgtacggcaaaggcctgctccacgccctcgaagctggaggagatctcctccagattttccagacgcttgacgtagctttccacgttctcgcggcgggcacccgggcgggcggcgctgatggcgtcggcagcctgaatgatgaaggccagcggggtcttgggctccacatcgccgtggtgtgcctcaatggcgtggatgatctgggtgttctccttgtacttgcggcagatgtccacgccgatctggacgtggctgccctcgatctcgtgatccagtgccttgccgatatcatgcagcagaccggcgcggcgtgccatggtaacgttcacgcccatctcgcctgccagcagaccggccacccaagccacttccatgctgtgggtcagggcgttctggccaaagctggtgcggtacttcagccggccgatcagcttgatcaggtcggggtgcagcccgtggatacccagctccatcaccgcacgctcgccctcgcgcttcatctgcagttccagatcgtggcggcacttttccaccgtctcctcgatgcgggcggggtggatacgaccatcgccgatcaggcgctccagcgtcatgcgggccacctcgcggcgggtctggtcgaaggaggacagagtaatggcctccggggtatcgtcgatgatcagatccacgccggtagcggtctccagtgcgcggatgttgcggccctcgcggccgatgatgcggcccttcatttcatcgctgggcagcggcaccacactgacggtggtctcactgcaatggtcggcagcgcagcggctgacggcctgtccgatgaggttgcgggcgatgttatcgcagttttccttcaggtcggtctcgtaggcggcaacgcgcacggccttttcgtgggtcaactcctcgtccaccttatgcagcagcacctcgcgggcgtcctcctggctcaaaccggccagcgtttccagacgctccatctccttggcgcgcagagcgtcgatctctgccagacgctcctcggcctcggcagcgcgctttttcagctcttcttccttcttttccagcgcctcggtcttgcggtccagcgctgtttccttctggtcgatgcggttctcctgacggctgatctccgcacggcgctgcttgatctccttgtcggcctctgccttctgggcatcgacctcggctttcagacggaaagcctcgtcctttgcttccagaaccgcttccttgcgcttctggtcggcggtcttgatcgcctcgttcaccagccgggtagcctcggcctcggcgctgccgatctgggcttcggcagtctttttacggttgttgtaaccaataaaatagcccgcagccacgccgacaacagcaacgatcaaggccacgatcactccgatcgcggtcattgcgttcactctcctttgtttcaattcaatgcaaaattaaaagcaggagacgctgcgcagcaggacacgggcaatgatatagaaagagctttcaatgcaaaaagtgacaccaaaaccatacgcaccacccaaaaccggcggcacgggcaaaagcatacggcttttctctttacggttccattttatatcaaacaggcacgctttgcctgaaacgggtacaggggtcacacagaaacctgcgtacagcgtctttgattccatactactaaatatagtacgaaacatttgcccgcttgtcaagaggaaaaccctgcccgcagaacattttgtgcagaaaaacaaaaataagatggccgagggggttctctccttcaaaccaaaagggctgccccggagaacggagcagcccttctggtttatgatgaagagaagaaaatgaaggagaatagcttattatttggcggctttttcgccctccgggaaaatgatcttattcacaaagaagaagatgaccatggagatgccgccgttgaggacggtggtgccgatgttgtagatgaagtccggtaccagcaggcctgccactgccacccagatgcagttgatggagttgacgatgcaggtgataacgcagaaggccagcacataccagccgatctgttttgccagattgcccttgctgcggaacacaaaattgcgctggatggggaagttgatgcactcgccgatgaccatggcgatcatgtaagcgcagaagtagggcaacccgccgtgggcggcatcgtagccgaggatgttccacttgaaggtctcgccgaacagggtgatgtcgatgcccggccagccgaaatccaccaccggcaggctggcaaaggccttgggcagaaattgcagcagcaggtacttgaacacggtgatgaggttggacacgatgacgaacaggccgccctcgcgcacccacttggcagcggcggggtgctttgccgcaaagttattccagaaattcatagcctgcttcctttcagctgtttttcaagcgctcttccatgcggctgttcagcacgaggttcttcacggcctcaaaaatcacccgcacaaggccgatgatccagaagccctgcagctccatcacgatgccgtccaccatgcccatgctgatggcgccgttggtcattttggacagcgcacgcagaggcatattgtactggaacaggatgttcaggtcgggcttgccctttttgatgctgcggcgcagcagggtacccagcacggcagccgccagccagccgatggggctgcgtccgtgccccatctcgcccagcgtcatgttgcggtcgatgtgcaccttgttctccgggatgggacggcccagcagcgcctcaaactccgcgtccggcaccttctgcacctgtgcagtgcggtaatgtgcaaggtctttgcccgcgtaggggtctggtgcgccggtgcccgccaccgtgacagcggcagtcagacggatatcggcgctggaagcgcccaccagcagctgatagctgccgccctccacctcccagcggtcggtggcaacgttccagtagcggaacgccttgtcgtccagcgggatggtgacggtcttgctctctccggcttccagctgcaccttggtaaagcccttcagctccttgacggggcggaaaacttttgcatccggctttgccacatacagctgcaccacctcggcaccggcacagctgccagtgttggtgacagtcagggtcacgcccttttcgtctgctttcaggtcactgtacgcaaagctggtatagctcaggccgtagccgaaggggaaggcggtgggcacaccggcggtgtcgtagtagcggtagcccacatacagtccctcgcggtactccacagtggggccgtcgccgccgaaatgctcctttgcgggggtgtcggcgtagctgcgcgcccaagtctcagccagcttaccgcaggggttctgcgcgccggtgagcacctcgaccagtgcgcctgcaccggcctgaccgcccagacagccgtagaccagcgccttgcagtccttgacccatgcgctttccagcgaggagcctgcactcagcagcaccaccacgttggggtttgccgccgccacagctgccagcagctccagctggttttcggccagcttcatgtcggcgcggtcgatgccctcgctctccttgatctcgtccagacccatgcacagcagcaccacattggcgttctttgccaacagcaccgcctcggctttcagtgcctcatcgggcttgccctgtcggtcaaagcccttggcgtagccgacgctgttcaggccgctttcggcaaggcagtccagaaaggaatctaccttgatggagttgacggcgctggagcctgcaccctgatagcggggcgtctgggcaaagtcgccgatgaccgccaccttttccccttttgcaaggggcagcaggctgttttcgttcttcagcagcacgatgctctgggcagcagcccggcgtgccagtgcgtggtgggcgtcggcatcgaacttgccgggtgcggcgtccaccgccgccttggtggtgaacaccagctccagcagttcctccagccgggcgtccacgtccgcttcggtgatcttgccggtctgcaccgccttcatcagctcccggatggcgtccccgccgggggcgggcatttccagcgtagagccgttctttacgccgagggcgtggtcgttgctgccgccccagtcggtgaccactgcgccgtcaaagccccagtccttgcgcaggatatccatgagcaggtgggcgttctcgttggcgtaggtgccgttgacaaggttataggcggacatgatggtcttgggctgcgcttctttgaccaccatctcgaagccggtcaggtaaatttcccgcagggtacgctcgtccacaatggaatccgaggccatgcggcgcagctcctgactgttcacggcaaagtgcttgggacaggcggcaatgccgtttttctggatgccgcggacgtaggccgccgccatcttaccggcaaggtagggatcctccgagaaatactcgaagttgcggccgcacaggggactgcgcttgatgttcaggccggggcccagcagcaccgacacgccctgtgccgctgcttcctcgcccatggctgcgcccacagcctcgcccagcgcggggtcccagctgttggcaacggtggccgaggtggggaagcaggtggcgggcacactggggttcaggcccagatggtcagccgcaccggcctgcttgcgcacgccgttggggccgtccgacagggtaatggccgggatgcccttgcccggcagcgcccgggtggtgaacaccgtgccgccgctcagcagggcgcatttctgttccaggctcagttttgcaataatatcctgatgtttcacggggaaatctcctttcagtagaaacggtattgcctttggaaacaggaccacgcataaggagaagaagcgtgattctgtttccaaaagggaacacggctgcgagtcgtaactgccgtgcagccgtgttccgggattagaaggaagacagttttgattacgggtcagtacttatgccttactcacatccgcacctgcattggtattagccagcgttttattatacttgcggcggcgaagaatcaccacaacacctgccagaaccaacacatagacaatcacactgcctaccagtgcaggcgtgcgccacataggcacaggtgcatctacatctacaccgtagctattcgccagcgtatacagatattgatgtgcagcttcgcgcatcttcagctgaccggtagcagtctggctcaggttatcgaaggtcttagtgccccagccaaacagcagattggtaccacctgccaagacagctttttcaatatccataaagccatgctcctcgttgttatccgtaatcacagtgccaataaagccccattcattacgcagaacattggtcagcagtgcagtacttgcaccggcccaagtagtaccaatattattgtaggaagacatcacagccgtgctgccgccttccttcacagccttttcaaacggcacgaagtaaatttcacgcattgcctgctcatcggcccaggtgcacaggccataatgacgccaggtttcacgctcattcagtgcaaaatgcttaatgtagcagtacataccatttttctctgccgcaccaaccgtagcagcggacatggaaccagaaaggaagccatcctcagaatagtactcaaagttacggccagcaaatgcattgcggtgggtattagcaccaggtgcataccagccggaaatattccacgcctttccttcctgcgagattgcatcgccaaattcagaagccaggtctacattccaagtagccgccagcagaacttctgccggataagtaaccgtcttatatgtgcaggtacccataaaggcatcgaacacataactcagagcggcaggtccgtccatttcataagtctgtcccttaccgatatcatcaactgctgcacttccccagccatctgcgcccagcagtttgtacatatcatcaagggtcagctgatccagcagcttatcccactgtgcatcatcataggcaaggccttccatgtctttcagcgtaaggccattctttgcaccaaaggtcggcgcagtgtcatctgcatccacatagctatcatccactaccagcgcattgttgaaggcttccagctgttcagcagttgcttccttgctggtaccgggaacgatctgccaagtgtcacggttgaggtaagccacatcaccagctgcatcatcaaactgatttgttgctaccacttcgtccgaagagcgcttgccgacatacttgcagttttccacaccactgccaaacgcactgtcctggaacacttcattctcagcaaccttgcaggtcatggtcagattatctttcaccgtatgagaatccgtacgcagagaaatctgatactcgccagcttccagcacgtaggaaccggtagaagtgtagtacttctgtgcatcataagaagccatctgctctaccggcatagaaatcgtaaccgtttccgtttcacccggctgcaattccttcgtctttgcaaagccgcccagtacttcgccagccttctgcaagccgctgccgccttcagctgcactgtaatagggcgcactgtaatacagttccacaacatctttgccagccacattgccagtattggtaactttgacattccactccagcgtatcctgtgcggtaacggtagtcggaatcgtgttttccagttcccagtcaaagcttgtgtagctcaagccatagccaaaggggaactgcactacatcattgtaggaaagtcccgtcagattttctccttcacgggtagtgtaatcgtagctttcacgggtttcgtaataacgatatcccacataaatgccttcctgatactctacaaggtaggcaggatgactttcgaagtttttgaagcagtccttagagttggtatactcaaaggtatcaaagttgtagtaagaaggggtcgtttctactgcataaggatagatatccggcagacggccagaggggttgactgcgcccgtcagaatgttgacaattccaatcgtgcccacatcaccgggatcaccgatccagagggctgcatcaacgccttcatcattcaggaagcccagttccatcgcattgcctgaattgatcagaacgataacattatcaaatgtcgcttctgcctgttccagcaaagactgttccgcgctgttcagttccagataatgcttgctctgatccggtgcatacgaggtattttcagccatcgaagtgggcaagtcattgccttcaccgcccttgcgggagaacacgaccacagcagtatccgaaaaatccttcattgcttcaaatgagcagtctccagtatactggtactccacacccatgtccttagccaattcctcggttgcaggcagttccgggatggaaaaatcaacagagaatgtatttccgccttcgttgtttttgggtctgtagagattgaccagattttgattcacttcaaaacctgcatccgtaaaggcttttacaaaatctgtccggtttgcagtgtagctgctgccaccggaacccgtaccgccataaaccggatttgcggaagcatagcccagaagattgatttttcggtttgttcctgccaacggcagagcaccgtcatttttcagaaggactgcgccttcctcctcgactttctgagccactgacaaaccatttgcataagatgttttttgcaattccgggtctccattctggccagggaatgccttgtccagagaactaggaaacacaccaaacattgctacatctgccactattccaactgccagtaagagtgctgtaacagctgtcagcaactttgtgggctttttgttgttcggatcgcgcttcattgtgttgtctcctccatattcttttatattttttgggccgtacccaactgtgacccattataacggatatttgcgcatcgttatcatcttttgcacaatctgtcgttttggatacacagtttgcaaaagttacaataaattttcaatttttattgtgctaatacacaaatattgcaacattgtatttgtgcaccctgccagacaacaaaaaacggcaggggatacctgccgtaaaaattatttgtttttgggcagcggaaataagatccgcagggtgcaccagttgttttcccagtgcatcgtcatgctgccgccgtgctgcccgacggtggtgcggacacttttcaggtccgacccctgctgcggcagaccgtccgcatccagtgcgggggcggcctctgtataatgctcgaaccgcagcatggcaaagccgccctgactgtacaccgccaccttgatgagccgcttttcgggatccggctcggcgcggacggcggcaatggcgttgtccagcgccacgcccacgatggtgcacagctcccggatggtgagaaagcccagcatcctgccgtctgctacgctggtgatggtgatgtcctcctgctggcattccatggtcttggcggtgagcagggtatccagcaccgggttgccggtcttgttctcggcctcatactggcggatgttctgctctatggcagcaatggcggcgttctgtttggcctggtcctgctcctcccggatgcgggcaagctggatcttcagctcatggtaccgccggttgatgaggttgatgccctccttgctgcgcttgtactgctcgtactggcggtgcagcacctcgtccatggcggcaagctcgctgtgcaaagcgttctcctgcagctgctcgtgctgcacagataagatcagcacgccggaaaaatccaccaaggtgcggatggaaaaaatgctcatattgatctcgctgcccggcaaaaagcccagattgctcaccgcaaaggcggtcagcgccagcatgaccgccgtcagggcggcgctgccgccgatctgtaagtgcccggcgggctggggacggcggtgctgcagatagcacataatgccgaacagcgtcccatacaccagcgccagcagcagcaaagacagcggctcccatgggccgcgggcgggccagagggcgcagtgcagctgccactccacgctggcggcaagctctgccagaataaacgcccgggcgcagtgatacccggcttccagcagggtgatgctccacacaccccataaatataggtaggaaagcccgatggccgttaccatgcaggggatccagagcccgccgggcacattgcccgtcagctccagaaaggccgacagccccgcggcccacagcagggtgatgcccccggtgaccgctctggaaaagcggggcgcaagcgccggggtgaacagcagcaccgccagacactcggcaagggcggtgtacagccgggggatatccggcagcgcggtcatgagccttcacctccgatgtagtcggtcagtgcggcaagaaaagccttacgcttggggcggctgacctgcagctcgcaggggcccacctgcacggtgctctgccgcagctcccgcacctgtgccagattgacaaggtagccgctgttgcagcgggcaaaggggcagtctgccagcttttcctcaaaggccttgagggcgccgggggcggaaaaatcgccctcatcggtataaaaatgcacccggtgcccctcgctttccaagtaatagatgcttgcggtgtccagacggcgcagcccgccctccaccggcacggtcaggtaatgctttgcccgcttttccagccgggcaacggccttgagcagttgctgcgaaaaggcaaagtagggcaccggcttcagcacatagtccagcgctcccaccgagtagccccggatggcgtactgcgccatattggtgatgaagatcaggatgacgtctgcatccatctgccggatgcgctctgccgtggtcatgccgtccagatgcttcatctccacatccagaaaaataatgtcgtagaccgcgcggtaatcctccagaatatccacgccgtccgcaaagaccgtcacttcaaactctgtcccgtactgccgggtataccgccggacatactcctgcaataccccctgcacctccgcgtcgtcctctacgatcgccacccggatcatgaccgcacctcccttaccacacctttgtggaactgttacggctctattatagcgcaatcccgtccggtttgccaaggggcactccgcaacaaagggcagggcagcccacagctgaccaccgtggacgtcaacccctaccagctgggcatggaggctgccagccagaccatcaaccacatcgagaacccgaaccttctggccacaaagatcatcgtgccgcacaagctcatcccccgggagagctgctgcccgccggaggagcagcgctaggaagtgctttttcagcaagacagtgtccgcttccgggagctgccgcgcagcgcttgctatcctgcccccagagtagacagcgtaaaaaacgctgcatcctccgggggtatttttatgcccaaaaaggcacaaaagaatgcccgcccacctgtggaaaaccacggtgggcgggcattttatggtttatcgtttgcgcgctgcaaaagcgttcagagggcggtgggctggggtaccagccggaagagcattacgggcagctcgctgtttgcaaaatccagcgtaaggatgatcgttccgcgctctgtttcaaaaggcatctccgtctgtgtgccgtccggggcaatgcgcacaagcgttttgccttccagcaatccggcgggcagcgcgagccttacccgaccggtgggctgcgtcaggctgcctgcggtttcaaaggccacactcaggtattccccgttcgtccgtgcggtcacatcctccgcagaaagactgccgctgttagcccacgccgttgccgcttcgatcatttccagctgcgcggcgttttctgcctgcccgcacacggggcagaaggtcagcgtttcgccttccgcagtgcggaaagtaaacttccggcaatccgtgctgccagtgtgcgcgcagccctgccgcagacaactggcgctctgagagccggttccgttcggggaccatgcaccgaactggtgccccagctgatcggtcgggtctgcggtgtagctgtctttgcagcggctgcaggtaaaaacagtatagccgtctgcttcacaggtgggggctacggtaacagcctgataatcatggttcagcgcgggcagttctgtataggtggtatggtcgcagcgggaacaggtttcgtaagcattccagccgatttccgtacaggtaggggcttttgctgcgtattgcttcaaatcatgattcagcgcgggcagctctttgcgggtggtatagttgcagccgaagcgggagcaggcttcgtaagcatcccagccgatttccgtacaggtaggggcttttgctgcgtgctgctccagagcatggttcagtgcgggcagctccgcgtaggtggtatagtcacaacgggagcaggtgtcgtaggcgttccaacccttttccgtacaggtggcggcttttgctgcgtgctgcttcaaatcatggttcagtgcggacagctccgcataggtggtatagtcacaacgggagcaggtatcgtaagcatcccagccaattcccgtacaggtgggggcttttgctgcgtgatgcctcagatcatgctgtgcaggcagctcgcagcccctttttcgtggctccagcgcgtcgaaatcgctggcacttttctggttctcttttggtgtcaaaagagaacatctctcggctacatcctcttcccccctcccctgttccacatggaacactttacttttctgcggcggcggtggggatgcgcacggtgtactcgatgtagccgtccttctcttcccggtgggcggtggcgggcacgccgttgtcggtcatcagccggatggcgtggtcgatggtattgacaaagatgcgcacgtcccgcaccatggagatgcggtgcccggccttgggcgggctgttcagcagctgctcgatgtagctgtcagtctgacgtgcgttcaggcggcgcttggcgatggtaatcagcgcctcgctgcggcggttctccggcaggcgcagcaccgcgcgggcgtggcgctcggtgaggttattgtccagcacaaattgccgctggtctgcggtcagctgcaaaagccgcagcttgttggcaaaggtgggctgtgccatgcccagacgcttggcggcttcggcttgggtgcagtcccacagcaccatcacatcccgcagcccctgcgcctgctcaaaggggttcaggtcggcgcgctggatgttttccagcaaacccagtgcagcggtgcggtcgtcggcgtagctgcacaggatggcggggatggtggtcatctttgccagctggcaggcgcgcagccgtcgctcccctgccaccagctcgtagccctctgccactttgcgcaccgtgaccggctggagcagaccgttttcccggatgctctgcgccagcgccgtcagctcctgctcgtcaaagcttttgcgcgcctgaaagggcgatgggtggatctggtcgatgggcagagagagtaatttcccggacgttttcttgcgttcaaacatgatgctgcccctttcctgtgaaataaactttcggtttttccacatttctccgggaaatcgtggaaaacctgttcagcttcagtgtagcacacaaagaaagaccccgccagaaatttcgttcggcagggtcttacaggttgcgtcaagttatgcgttatttcagcgggctttttgcaattttaccgccgtttctggggtatgctgtcggagtttgcgaaatctttttgcacaaaatcagcgtgcgggtgtcgccgccgggcaggtgcaaagtgcgggtctcgcggtactcgccgcccagctttttgatagcaccccgggcggcggtcagctcctcttccccggatgcacccttcatggcaaggaagttgccgcccaccttcaccagcggcaggcagtattctgccagcatgggcaaggctgccacggcgcgggcagaagccagatcaaactgttcccgccacaccttgcgggcagcttcctcggcgcgctccttggcaaactctaccccggtcagacccagctgggcgcaggcgtacttcaaaaactccacccgcttgccggtgggctccatgagggtcagttccagctccggtttgaagatcttggtcacgatgcccggaaagcccgccccggcgcccacgtctaccatgcgcccggcaacctccggctggctggcaaacagcaggctgtcgaggaaatgcttgtcctcgatgccctccgggtcggtaatggcggtcaggttgaccttctggttgtagtctacaaggatctgggcaaaggcatccagctgatccagctgggtgccggtgagggtgatgttccatgtggaacacttttcctccaaccgctgtttgtcgatcatagtgttttcctttctgtcaggtggttggggtagcgcaatcgtttattttatcgcaaattcgtattatttttgttgtttccctgccagtgcgatgctcagctgcgccacatcggagggcgaaacgccggggatgcgccccgcctgccccagattgcggggacggatgcgggccagcttttcccgggcttccagcgtcaggccggtcagggcggcatactcaaaatcctcctggatgagggtcttttcgtggcgtgccacctcacggatcatcctgtcctgtcgggcaatgtaaccggcgtatttgatctcagtctccagccgctccgccagcatgggggtgatctcctctccccagccgatgatgcccgccaccagcgggtaactgatctcgggacggcgcagcagctcctcggcaatgccgccctcggcggcgggggcaagaccggcggcttccatggcggcgcgcaggtcggcggtgcgcagatgcgtctcgtgcaggcggcggcgctcggcttccaaaatctgctgggtgtgctggtactttgcccagcggtcatcctgcacaaggccgtattccctgccgatgggggtcaggcgctggtcggcgttgtcctgccgcagggtcagccggtactcgctgcggctggtcatcatgcggtaggggtccatgacgcccttggtcacaaggtcgtccaccagcgtgcccagatagctggtgtgccggggcagcaccagctgctccttgcccagcgcgttgcgggcggcgttcagacccgccagcagaccctgcgcagcggcttcctcgtagccggaggtgccgttgaactgccctgccccgtacagtccccgcaccaccttgctttccagcgtggcttccagactggtggggtctacgcagtcgtactcgatggcgtaggcggggcgcatgatctccagatgctcaaagcccttgatgctgtggtagaaggcgttctgcacgtcctccggcagactgctggacgcgccctgcaaatacatctcctcggtgttctcgccgcagggctctacgaacagcgggtggcggtccttgccggagaagcgcaccaccttatcctcaatggaggggcagtagcgcgggccgacaccctcgatcatgccgccgtacagcgggctgcgctggatattatccagaatgatcttgtgggtctccgggttcgtgtaggcaatccagcattccaccttattgtgcaagggtgcatcggtcaaaaagctgaagggctgcaattcgctgtccgggtcgccgggctggcattccagcttggaaaaatcaatgctgcggcggtgcacccgggcaggggtgccggtcttgaaccggcgcagcggcagaccggcggctttcaggctgtcggtcagggcgttggcggcgtgcatcccatccgggccagacgcataccacgcatcgcccacaaaaattttgccgccgaggttcgtaccggtggcaagcaccacgcacttggcggtgtattcgccgtgcagctgggtgacaacacccttcacatgaccgttttccacttccagcgccaccacctcggcctgatggatggccagacccggggtctgttccagcgcatgcttcatgtattcgttgtagcggcggcggtcggtctgcacccgcagtgcgtgcacggcggggcctttgcccttgttcagcatccggctttgcagataggtggcgtctgccgccagacccatcacgccgcccagcgcatccacttcccgcaccagcgtgcccttggcggtgccgccgatgctggggttgcagggcatattgccgatggcgtccagactcatggtaaagacagccgtttttgcgcccagcacagcagctgcatgggcggcttcgatgcccgcatggccggcgccgatgacgatgacatcatattctcctaagtggttcatatactttcgggtttcctctaatcaatgatttgaatttattttcccacacagaaccgctcgaacacctgttcgatgacggcttccgaggcgttttcgccggtcaggtcgcagagcgcgtccagcgcatcatccacgcagaccgagacggcatccagcccaaagccgcctgcggcggcatccagtgccccggctacggcgtcccgggcgcggagggcagcagaaagctgccgctgcccggacaggctggcggcgtgggggtcgatgctgccggtgcccagcagccgcgccaccgcagcggcgatgaccttgcggctcccttcttcccggcagcagaccggcagcaccatggcaaaatagggggcgatgagctccgcatcaaaccgggtgggcttgtcctccttgttgacaagggcgatggcggggcgaccggcgcagcgctgcgccagcgccaagtcctcccggctgggcggctcggagccatcaaagacggcaaggatcagcccagcttcttccagttttttccagctgcgacggataccctctgcttcaatggcgtcctcggtctcccgcagaccggcggtgtcaaagaggttcagccggatatctcccagctgcaccgcctgctccaccacatcgcgggtggtgcccgccaccggggtgacgatggcacggtcgaagcctgccagcaggttcagcaaggtagacttgcccgcgttggggcgtcccacgatggcgcagtccacgccctcgcgcagcaccgcaccggcatcgtagctgcggatgagggcatccagttcctcccgcacggcacccagcacggtgcgcagatgggcggggtccagctccggcacatcctcctccgggaagtccacccaagcggcaagatgcgcctgcagggcggtcagctgggctttctgagcgttgatttttttcgccagtgcaccgcccagcgcggcatttgccagcgctgccccctgccgtccgtctgccgagatcaggtccatgaccgcttcggcctgggtcagacccagcttgccgttcagaaaggcacggcgggtgtactcgccgggggcagcaggctgcgcacccgctgcaaggcaggcttccaccagccgccgcgccaccgcgctgccgccgtggcaggaaagctccaccacatcctcgccggtgtagctgtggggcgcgcggaaaaacagggcaacgccctcgtcaaaggcttcttccctgtccacaaaatgcccgtacatggcagtatagcctttggcctgttccactttttttgcggcgttggccgggcagaacacccgggccgccacctgatagctctccgcaccggagagccgcaccacggcaatgccgcctgcacccggtgctgttgcaattgctgcaatggtcgcttcctgcatagttttttctggcttcctttccgcgcccgatctggccgcttgctcccatctgcccacagcagcgagaccaatacagtttcattgtaccacgaaatgctgcggaatggtactgttttttcaaccaattcccgggaaacggttgaaaatccgcccgtttctcacacaaaaaagggactttccgtcccaacacggaaagcccctttttacaggaaactgatttttagaacttggcgatctctgccgtggtgatggccttgccgggcagcgtgcgtgcatcggcattctcattcagggccagcttgccttcgcgcagcagctgcacagccttctggtgatcggcggccttccagttgttgcccacgatcttccagttgttgttcacgtgcggctcgatggtgccgcccttcacggtgcggatgtactcgcccagcagctcgcggatgccgcccacatcgccgcgcacatcgatctccagcagcttgggcagatcctcaccgggcaggaagatgtccgcagccgtcagcagctgggtggtggcacggtagttgttcactgccacaacaaaggtgtcggtgtccttcacggccttgccgttcggccacttgaggttcttgatgcggtggcccggctccttggagacgtccagctcgtagttgacgccctcaaaagcatcgtacaggtagtagcgcaccgaggggtcaaaggcgatggtcacttcatccggcttccatgtcttgaagaaggctgcggaccactccataaagcggcgcagctgctcgccggtcatctgcagcttgtacagggtgttctggtaggtgtagatgctggccatatcgcacttgcggatggtgcctgcgcgcatctgggaggtcatggaggtcagggccgttgcggagacctgcgcaccggtgtagtacatctgcacttcgttgatgaagtccagcagagcggtgtcctgcaccatggcctgcggcaggcagtcaatctcgttttcgggggccagatcgccgcccttcagctcgccgatgggggtgacagcgtcttccttggcgcgggtgtcgtagggagccagcagagcggtcagctccggatcgggttcgtactccttgatctgcaggttctccgaggtgcggttcacgaccttccacttgccgtccagctggcgctccagatagacgtggatctcggacagggtggcaccggcgttcttgttctccaccaccagcacgttgttgatcatcatgttggggatgctcctgtggccgtggccgcccacgatgacgtcgaactcggggcaggcatttgccagatcggtgacgccggagccatagacgccgtactcgttctcggtatccatgtgcatgacgccgatcagcacatccacctgatccttgatcttatcgatgatcctgcggctctcgtccacagggttggtgaccttccagccctccagattcttggcatcccagcggatgatgttgggggtgaccatgccaatgacgccgatcttgacggtgccctttttgatgatggtgtagccgtcggccagcggggtgccgtccggtgcgtaaacgttgccggtgagcaccttggccttctgctgtcccatgacctttttcagcacatccatgccgtagttgtactcatggttgccggtggtccagatatcatagccgatggcattcatggcagcgatcatgggatgcaggtcatcgttcaggaacagctctgcggagttggcctgaatggtatcgcctgcatccaccaccagcgtgttccgggtgcggcactgcttgatggcggtcgcttgctgggccacgctgccggaagcatctgccttgttggcggcgtaatcccaggggtcgaacttgccgtgggtgtcgctggtggcaaggatctgcagatccatgctccacagggacttgatgtcacaggcggctgcagagggtgccatgcagctggcggctgcgatggtcgcggatgcccctgcaccacgcaggaagctgcggcgggaaatcttgttctgggacatagtcgattacctctcttttcatcattctgtctgttcttcacgaacagaacgcccttgactacagtataaatccttgaccaattgttttacaattgccatttgagagaaagatttcggcaaaaaacaggcagtttctccaaattttgagaagaacgactttaaaaacacaggaccggacagcctgcgggctgtccggtcctgttgcttcaaaaatattttcgctattacagctcgatcttgccaaagctgaaatctgcaaagtcgtccacgcgctcggtgcgcttgggtgctacgggtgctgcactctcggcgtcacggggggcgtaggtgcgctccggcacactggacggacgcgggccgcgaggtgcaccgctgcggctgccacggtagccgccattgctgcggcgctcaccgcgataaccgccgttgcggttgccgccgggacggcggccattccggttgccgccacggccacggcgctcgccgtaggtattctcagtctgagcatccggtgcggtggagtagatgaccacgcggcggtcacggccttcgcccttgctctcgctgcgcacaccctccatcttgctgatggcagagtggatgatgcggcgctcgtaggggttcatgggctccatggcaaagctgcggccagtcttgcgcaccttggcaccaatgcgctgtgccagtgcggtcaggtcgctctcgcgcttgtcgcggtagccggcaacgtccagacccaacttgatgtaatcgccctccagacggtttgccacaaggcttgccagataggacaggctctccatggtctcgccgcggcggccgatgagggcacccagcttttcaccgtccagacggatgatagtggcttcgcccttctgcacggcgctgaaggtcacgttctccacgcccatcagggtgatgacctcccgcagatagtccacagcggccttcaccttggcgttttcttcgatcacgatgggctcttccacctcttctgcctcctcggcagcttcggcgggctgctgggcagcgggggtctgctctgcggcgggagcggcaggctcttcctcagcaacaggagctttctctgccactggggcagtctcctgcacgggggcggcagtctcaacaggctgctctgccaccggctttgcgggtgcagcggcgggggcatccggcagttccacgcgcacgcgcaccttggcgggggtggtctttaagcccagaaaaccggtcttctggggcatttccagcacttcatagctgacattcagatcgtcggcctgcacgcccagcagggcgcaggctttggcgcgggcttcgtccaccgtcttgccggtggattcctgtgtacggatcataaccgtttacctcccttgttactgtttatcctgcttgtcaagctcgctcagcggcacggtgcgctcgtccttgtagcgctcggcgtccagctgacgggcatactccagccggcgcttgttcatctcgctggcggaaaggttcttttccacgcttttgccggtcttggggtcggtcaccgtaatggtggtgttcttcacaccgcgcttttcctgcttgcgcttggcggcgatctcggcttccacttccttgcgcatcttctcggggtcgtagaacttgcgcatgacctgagtctgtacggtcataacgatgttggaaatgacgtagtacagagagaatgccagagggaaggtaaagcagaagaacaggtacatcagcggcatcatgtacatggtcagcttcatgctgccctgcatctgctggccggaagccttcatgctgatgtgggtggacaggaacatggtgatgaccgacagcagcggcagcacgatatccagagacagaccgatctgcgggatgcgggtcaggtcgatgccaaagaagttcatgtgctggccgaactcggtgatggtagcgatctgctcgacgctgaagcagcccagcacgccgctgttgcctgccagtacctcggcgatgatgttggtatcgcgggtgatggcggtaaaggagatgccggcggcggtcatagcctcgccagcgctggccagtgcagcggcgctgatgtggaaaatgcgctccagcgggttatacaccacgccgataacaccgaacatgacaaggaaattcagcagcatgggcacgcagccggccgtgggcttatagccaaagtcctgctgcagcttcatcagctcttcctgctgcttttcaggcttattcttgtacttggtctggatctctgcgatcatgggctggaaagcagacattttcgccatgctcttctgctggctggtctgcagggggatcttgacgatgttgatgagcagggtgaagaggatgatgtcccagccgtagttcggcagcagcttgtagatccactccatgacatagccgagaggaccgctcaggatgtaaaagaagttcatacctttgtccattctgccccggctgtggcccgggacgcattatttttttatcgtaggacacgccgcccacagtgcagcgcgtcacaagaagcgaaaactttatcccctgtgccgcttttcaaacagctttgcgggctgcaagttgcgggcagggctttgccagcggccgggcggcggcacggggtcgtagccccatttgcccagcggattgcaccgggcaatgcgccatgcgcccagcaaaatgccctttacacagccgtgagtcaggatggcctgcatggtgtagttgctgcagctgggcgaaaaccggcagctgcggccgatccatgggctgagggtgtactggtagatgcggatgggcacgcacaatgccctgcggcagagcatttgcagccggttcacacgcgggactccggcttttgtttgcgggcagggggcacggtggcgggcggctttgcatccgggcgcttggccttatccggcagaccggcctgtgcaaacagctttgccacaacgctgctcagctgccagcttttcagtttgggggtcatgccccgggccacgaagatcagatcgtagccgccgatattgtgatccagatgctcgtcaatcgcagctttcatcacgcggcgggcgcggttgcgctgcacggcatggcctatttttttggtggcggtcaggcccacccgggtgttgcggccccgggtcttgagcacatacaataccagtgccgggttcacataggacttgccgcgggcgtacacacggccaaactcgctgttgcggcggatcggacgataacgcataacatcggcacctcctttcgtccgggtgcacataggtgcactctttagccagtatatcaaaaatttttgcagtttaaaagcccatccgggcatttttacgaaaaaacttttgacgggtaaaaaaataagaccgccaatgggatatcagcggtcttttgtgcgcatattcatttctgcgccggatctcacctgcaaggcagagatcagacagtcaggctcttgcggccctttgcacggcgagcattgatgaccttacggccgttcttggtgctcatgcgggtcagaaagccatgaacttccttgcgctgacgcttcttgggctgaaaagttctcttcatggttgtatcctccgtaaaaacttatccccggtatggggtcttgatcggtcccagattggggacaggcttgcaattcaacagtatatcgcatagtatgacgttctgtcaagcattttttgcagttttctgcaaacttttttctgatttttctgttaaaagcttttcaactttttcaccattttgctgtggaaaacttttttctaccagatattgtggtcttttgggcgtgtttccacaagggcgctgcgggggcttatcttatgtattataaattacattatagtaatatagacgcagggagatttttgtggtatactaacatggtatcagcagcattgttgaaaacttcgaccgattcaatggagtggatgttttatggattctttcaaggacgttttagaagcggcccagatgtactgcaaggcgcagatggccgagccaacgtacaatctctatatcgacgggttggagcccatcagctttgaggactccagccatatcaccctgtcggtgcgcaacgattttatctgcaagatcgtcaccgaccggtatcttggcctgctcaaggaggccttcaagtccgtgctgggctttgatgtggacatcacccttgtggtgcccagcaccccgccccacgaagtagtgctggcccagcagtacgaggcaaaccccgcctccccgcagggcaactacgagttcacctttgaaaacttcatcaaggggccgtccaaccagtttgcgtttgctgctgcgcaggctgtggcggcaaatccctccggggcctataaccccctgttcatctacggcggctccggtctgggcaagacccatctgctgaccgccattcagaccgagatcaagcgcacccaccccgatttcgtcatcatgtatgtcacctgcgagcagttcaccaacgagctgatcgccgccatccgcgccggcagcaccgaggacttccgcatgaagtaccgcgtggcagacctgctgctggtggacgatatccagttcatcgcgggcaaggagtccacgcaggaagagttcttccacaccttcaactccctgcacgacgcccacaagcagatcgtcatcgcttccgatcgccccgccaaggagatcaagagcctggaagagcgtctacgcacccgctttgagtggggtctgaccgccgatgtgcagccgccggattttgagacccgagttgccatcgtgaagcgcaaggcagagctgttgcatctggacctgcccgaggacgtggcagagttcattgccaaccacctgaaaaacaacatccgccagctggagggcgcagtgaaaaagctgaacgcctattatatgctggagggcatccagccggtgatcagcgtggcgcagaacgccatcaaggatatcctcaacgagacccagccggtgccggtgaccatcgaaaagatcatcggcgaggtgtcccgcaccttcaacgtgtcccctgccgacatccggggcaccaagcgcaacgccaacgtggcttccgcccggcgcgttgccatctatatcctgcgggaggtcaccggcatgagcatggaggagatcgggcgggaattttccggccgcgaccactccaccatcgtctactccctcaagaccatggaacgggacatgaagaacgaccagcacctgcgggagaccgtgagcgatatcatcaaaaacgtgaaggcctaaaccggagaaaaccgggcaaaagtcatactcatttcagggtgtgaccccaaaatatgggaagaaaacggaacaaaaaggggaaaataagcctatatcttgtggcaaaaaggcgaagctttccacactttccacttagttttcaacatttaacatcagttcttcacatcggctgtggaaagaaacaccgttccccacctttcaacatttccttcacgagccttccacatcccggtggaaagccaaagccccgcttcccggcaagacatttccgggttttcaacatcttccccaccccctactacggttactacaacaagttcaatatattactgccttccggcagcagcccaaagggcagggatcaagccggaagtgtgaaaaaaggagagatactgttttgaacatcgtctgcgataaaacactgctcagtgcagccatcgacggcgtttccaaagctgtcaccatgcgctcgtccatcccggtgctggagggcattctgctgaaggccgagggctttcagctcaccctgaccggctacgatctggaaatgggcatcgtgaccaccatcgaagccaacatcaaagaacccggtgagatcgtgctgaatgcaaagctgctcagtagcatgatcagccggatgccggcaggtcagatcagcatcgtggcggcggataacggcaagaccaccatccagagcggtgtggcacagttcgagatccagtccatgccggctaccgatttcccggatctgcccaacaccggcgcggagcagaccctgaccatcaagaccggcgtgctgcgggacatgatcgaccgcaccctgtatgccgtcagtcaggacgagaaaaaacccgcccacaccggcgaactgttcgagatcgagctggacaagctgaccatagtggcgctggacggctatcgtctggccatcgtggagcgccccatcactgccgtgaaggatatccgcatcatcgtgcccagcaagaccatgaccgaggtgtcccatctgctggccaacgatgacgaggaggatgtgcacatcagtgccaaccgccgctatgtggtgttcaccaccgccggttacaccatcatgagccgcctgatcgagggcgagttcctgaattaccgcaacgtcatccccgccggaagccgcacccgagtgaccatcgataccaaggattttatctccaccatcgagcgtgcctctctgattattacagagcgtttaaaaaatcccctccgcatctcctttacagagggtaaagtcgtggtgcgctgccagaccaacctcggccgtgtggtggacgagttcagcgccgcctgtgagggcgacgaggtagagatcggcttcaataaccgctatctgctggacgctttgcgcaacgcccgcaccgagcaggtgcgcatggagatcagcggacctttgagcccggtcaaggtgctgccggtagagggcaacgactttttgtatctggtactgccggtacgctttaaaaacgactaaggagcgcgttttatgcagaagattctcattcataccgagtttatcaagctggatgccctgctcaaatttgccggtctgtgcgagaccggcggcgaagccaaggagctggtgcagggcggtgctgtgaaggtgaacggcgaggtgtgcaccatgcggggcaaaaagtgccgcgccggagatatcatcgagctggacgggcagagcgtagagatcgggcagggtcagtaaatgcgtctgctttcgctggaagtacagaactatcgcaatatttgtgcggcccggctggagcccggccgggagcttaccgtcatctgtggcaacaacgggcagggcaagacgaaccttttagaggccatctggctgctgaccggcggcaaaagcttccggggcggcaaggatgccgagcttgtgcgccggggagaagcatttgcagtgctggaagccgacacccagcgggaccggccggagggctgtgagcccgccgagcctgcccacatccgcatgaccgtgggcaccccggaggccgcaaagcccggccgctatgcggcggtgaacggcgcagcgcccaagcgggcggcggcactggcgggcagctttccggcggtagtgttcgaccccggccacctgagccttgtcaagggggcaccggaagggcggcgcaaatttctggacgctgcgctgtgtcagctgtaccccgggtatctggccagttaccgccgctatgtgcgggttttacagcaaaaaaatgcgcttctgcgccattccgcaaacgggcaggagcgcccctacgcggaaaagcgcaccctgctggaagtgctcaacaccgaacttgccgcgcagggagaagccttgcagcagcggcggcgggagtatctgaaactgctggctccccgcgcctgtgccaactacgcggagctttcccacggggcagaacggatgagcatccgctatgccgcccagtttgcgccgggcgggcttgccgatctgctgcgtcagcggcaggaggaagagctgcgcgccgggcagagcctgtgcggcatccaccgcgaggatttggagctgctgctggacgaccagcctgcccgggtgtatgccagtcagggacagcagcgcagcgtggtgctgagcctgaaaatggccgaagccgcggcggcggcgcagatcaccggggagcacccggtactgctgctggatgatgtgctgagcgagctggacgaagggcgcaagcagtatctgctcacctgcatgaaggaaaagcagacctttgtgaccagctgcgatgacacggactttttaaagaccgacggcgaggtgtaccgcatggacggcggggtgctgaaccgggtctgacggcatagataaatgttgtaagcgatactgcataaaagctgcattttcacggactttatgcaaacaaaagacacgggagaaaatacagtatgtatattcatctggggcgggactatgtcctgaacgaccgtgacatcatcggtatctttgatctggagaccaccaccatctccccccgggggcgggagtttttgaactacgcccagaagaacggggcggtggtcagcctttcggacgagctgccccagtgctatgtgctggcagacggagggctggtggatgcggtgtatctttcggagctgtccagcgccgccatgcgccgcagagcgcaaaagatggtggagtgaaatttgcggaaaacgggcggaagatccacagaaaaaagagggatgggaaagccccggaactgcccggaaagccgcaccgtgccagccggaacgccctgtgcgggcagcgcgtgaaaacacaacaaaacggcgagaaaaaagtacaccatggtgtaccggttcccgctttgctataatttgaaaaaacaaacgcaaaaatgaacaaaagggagaaaggatatggcagaagaaatcattaccagtacaaatgccgataccgtaaccgaccacgagtataacgccagcgagatccaggtgctgaagggtctggaggcggtgcgcaagcgcccgggtatgtatatcggctccaccggtgagcgcggtctgcatcatctggtgtacgagatcgtggacaacgccattgacgaggcgctggcgggttactgcgaccacatcgaggtcaagatcctgaaggacaacatcattcaggtcaccgataacggacgcggcatccctgtggacattcaggccgacaccggtctgcccgccgtcaccgtggtgtacaccatcctgcacgccggcggcaagttcggcggcgaaaattccggctacaaggtggccggcggtctgcacggcgtgggcgcttcggtggtcaacgcctgctccgagtggctcaccgtcaacgtgcgccgcgacggcaaggagtacgagcagaccttccggcgcggcgacccggacggcgacctcaagtgcatcggcacggtagccgagggcgtcaccggcacccgggtcaccttcaaacccgacccggaaatgttcaaggataccaccgtctacgacttcgacacgctggaaaagcgcctgcgggaggaaagcttcctgaacgccggtgtcaagatcaccctgaccgatgagcgtcagctgtacacccccgtgctggaggatgggcaggagggcgacccctgctaccgctccgaggtcatgtgctacgagggcggcatcaagagctttgtcacctatctgggcgaaaagcgcaagctggaagtgctgcaccccaacgtcatctacctcaaggggcagaccgaccgcggcgtggcagagatcgctttgcagtacaattccagctacaacgagctgcttttgagctttgccaacaacgtcaacaccccggacggcggcacccacgaagagggcttcaaggccagcctgacccgcgtgttcaacgattacggccgcagccacggcctgctgaaggacaaggacgagaacctgtccggtgcagacgtgcgcgagggcctgatctgcgtcatctcggtcaagctgcaggaggccgaatttgaaggccagaccaaggcaaagctgggcaataccgaaattcgtaccctcgtttccaacatggtctactccaagctgatggagttctttgaggagaaccccggcgtggcaaaggctatttttgaaaaagccacacaggccgcccgcgcccgcgccgccgccaaaaaggcccgcgaactggtgcgccgcaagagcgcgctggagaccagccggatgcccggcaagctggccgactgccgcgaaaaagaccccagccgcaccgaaattttcatcgtcgagggcgactctgcaggcggctctgccaagatgggacgcgactctgccattcaggccattctgccgctgtggggcaagatgctgaacgtggaaaaggcccgcgccgataaaatttacggcaacgacaagctgatgccggtggtgctggcgctgggctgcggcatcggtgacgagttcgatatctccaagctgcggtacgacaaggtgttcatcatggccgatgcggacgtggacggctcccacatctgcaccctgatgctgaccttcttcttccgctatatgcgccccctcatcgagcagggtcatgtgtatgtggcacagccgcccctgttcaaggtgcagaagggcaacaccatcaagtacgcctacaacgacgcggaaatggccatcctctcgcaggagatgcccggcgcaaaggtaaaccgctataagggccttggtgagatgaaccccgagcagctgtgggagaccaccatgaacccggacaatcgggtcatcgtgcagatcaccatcgaggatgccgaaaaggctgacgaagcttttaccatcctgatgggcgatcaggtggagccccgccgccgctttatcgagaccaacgcccagtacgcaaagctggacgtgtaagacacggaggaacaaatggaagaagattatgtgatgataccgggcagcggaacaaaaaagatcatccgcgacgtcaaaaaggagatcgaaacggccttcctggattattccatgtcggtcatcgtgtcccgcgccctgcccgatgtgcgggacggcttgaaacccgtccaccgccgcatcctgtacaccatgcatgagcgcggcaacgaccccagccacgcataccgcaaatctgccgataccgttggtgcggtgctgggctcttaccacccccacggcgacgcatcggtctacgacgccatggtacgtctggcacaggacttctcgctgcgctatccgctggtggatggtcagggtaactttggttctgtggacggcgaccccccggctgcttatcgttacaccgaggcccgcatgagccgcatggcggtggagatgctgaccgatatcgagaaggacaccatcgactgggaccccaactttgacgagaccaaaaaggagcccagcgtgctgccctgccgcttcccgaacctgctggtcaacggcagtcagggtatcgcggtcggtatggctaccaacatcccgccccacaacctgagcgaggtcattgacggctgcatcgcctatatcgatgacccggacatcgacctgcccggcctgatggagcacatcaaaggcccggacttccccaccgccggcatcatcatgggacgcagcggcatccgcgccgcctacgccaccggccgcggcaagatcaccctgcgcggccgcgccaccattgaggagactaagaacggccgcacccagatcgtgatcaccgagatcccctatatggtcaacaaggcacgcctcatcgagcacatggcagaccttgtcaaggaaaagcgcatcgagggcatcaccggcctgaacgatgagaccaaccgcaaggggatgcgcatcgtggtggatatccgcaaggacgccaatgcacaggtcatcctgaaccagctgtaccagtacacccagttgcaggacaccgtgggcgttatcatgctggccatcgaccacaaggtgcccaaggtgctcaccctgaagcagatgctgcagaagtatgtggaatttcaggatgaggtggtgcgccgccgcacccagtacgacctgaaaaaggccaaggagcgcgcccacattctggaaggcctgaagaaggctaccgatatcgtggacgagctgatcgccaccatccgcgcctgcaagggcggcatggcagaagccaaagctgccatcatggagcagttcggctttgacgacccgcaggcagacgctatcgtcaagctgcagctgggtcgtctggctggtctggagatcttgaagatcgaggaagaactggccggcctgcaggccaagatcgaggactgggaagccattctggccgatgacgcccgggtgcttgccatcgtcaaggacgagctgctggaaatgaagaagcgcttcggtgacgagcgccgcaccgagatccagtccgtgaccggtgaggtggatatcgaggatctgatcgccgaggagcagtgcgtctacaccctgaccgaggccggttatatcaagcgtcagctcaaggccacctatcaggcacagcggcgcggtggacgcggcatctccggcatgacccgcaaggaagaggatatcgtgcaggagatgttcgtaggctccacccacgactatgtgctctttgtcaccgaccgtggccgcctattccgcatcaagggctacaccatcgccgagggcagccgcaccagcaagggcatgaacatcgtcaacctgctgcagctggcggagggcgaaaaggtgaccaacatgatctgccagagcaaggatgctgagcagtcgggcggctatgtgactatggtcaccaagcagggtctgatcaagcgcaccccgctggaacagtacgccaacatccgcaagagcggcctgatcggcattgccctgaacgagggcgatgcgctggcatggacccgcctgacctccggccacgatatgctcatcgttgccacccgcaacggtcaggccatccgcttcaacgaggaggacgcccgcccgatgggccgtaacggccacggcgtgcgcgccatccgtctggcggagggcgatgaagttgtcggcgtgtgcatctgccgcgagggcggcacggtgctgaccgtgaccgagaacggcaagggacgccgctccgatatcgacacctaccgcatcaccgcccgcggcggcaagggcatccgcaactacgatgtgagccgcgacaaggttgccgccgtgaagatcgtggatgatgtggatgacgtgctgctgagcagtcaggagggcatcatcatccgtctgcacgccaacgagatcccgctgcagagccgctatggctccggcgtgcgggtgatgcgtctgggcgagaacgacaaggtgatggtgctggcacgcaccgaccacgacgacgaagcacagaccgagaagatcgacgcttctgaggccgatgccgagcccaccgccgagcagctggccgagatggaagccgccgatgctgccgccgccaccgaagccccggaggcagaccccgaagagaaggaataagggacagttttcctctacgacccctcctgtgaaaatgggtttgggatagtccgcgtttgcgcagcaatgaaagccccagtggggcttttaagcggcagagcggtctgcgttagcagatggaggggctttgccccgacaaaattttcaatactcgaaaatttcctgtcccctttgggactgtttcttgttggggcgtgcctgccccaaaccctgcttaggagtgagtgcgatatactaggaatttatttattgcttgcatcggttttgtcgtttccctttttcttacgagacaaacctaaacaaagatgcgtcgagccaaggcaaagaaatgatgaaccaagacacaaccatacaacagccatagaattatcatttccacttatgaagctaataagtgaagccatatataacagagcagaagctgcatagaataagatagatttcttggtttcttttttcataaataatcgcctccacaaatcgatttgttgagtcaattataccacattctttatcgaaattacaccctctacatgggagaacttggccgatttactgcgtacgtgcgtacccatcttccgtatacacgtatgcggcgatttgcccgaaacgcactctatacagccgttccccctcggagagcccactacactttgcagaccacagggatgaaagtgtcatagtaggttattacacttccgcagaagtgccttctcctcgccgcagacagccgggtgtgccttttgtgagagctttctgtgcggcgaatctacatcgcccacaggcgatgtaagcagggattccaaaggggcgcagcacccttggcacacgactttggtacaaagtctagtgtgttacacctttccagaggtgtatacgttcctgaaatgcaaaaagccccatacccaacaccttaacggtgcggacatgggacttgatgcttcctcggcctagccgggtactccgtaaccaatcctgacaggcagttgccgtgtcatttttcgaaaactgttttacggatacccagcagtcgggaaggccctgtttctctttgctggtggtgtgatgagcctgttccgcctgccataggcaagctcgcgtttgcgcagcaacaaaagcctcagtgaaatatcattcaaaggtttccagtgcttccaccagtgcaaggatggtcagcgactggccgtatgccatgggagcaatcagaatgtttttgtagtggtcgcggtcgtagcccatacccgtaccgccggatactttcagcaccgtaccatcggtgtcgatgttcttgaggattgcacggatagctttcttggcacagggcaggtaggaatcatccagaatccccatgcggatgcctttcaggatgccagcggtgatagcagcagagccggaagtttcttcgtagctggtggagtcgtccagaaccgtatgccaaaggccgtcctcaccctgaaggtcacgcagtgcgcgcacctgtgctttgtaggtatccagaatgaacgtcttgacgccctgattcagcgtacccttaaacatatccagatagtccagaatacccagcgtgaaccagctgttgccgcggcaccagaacacgccgccaaagttgtccatccgattgaacgaccagccgtggaagaacagaccggtgtgggtatcgtacagatacttgatgtgcatcagcacctgcttaatggattcgtcgatccactcctgcttgccgtacttctggcccatccgattgaggaacaagacggtcatgaacagggtgtcgatccacatctcgctctcgtttaggcgaacgccctgacggtcgccgttggcactggtgacgtgctgaaagccaccctcacgggtacgcgggatgcactccatcagccactttgcccaatccagacaaagggcttcaaactcagggtcgtggtaaatctcgttcaattcacacagagtcagcagcggagtagtcgtgttgatattgcgggaaggcagaccctgcgcaatgttctccttgaaccaatcatgcaggaaggtgcggtattcctccgaatcctgcatcttggcgattttgagcagtccgtacaggccgatgccctgcggccagtcccactccttgatgccgaagtcacggctaaaaaatccgatggcctcgccgccttctttcaaagtgtcctcgttttcgggggcaccaaggtgcatcagcttctggacaacaagatccagctttttctgaatcagttcttttttgatttcgtttgccataaaaaacacctcatgtatttgtattgtttttctcagcggttgaagtaagcgattttcgatattgtgcaggcgtaacgtgttgatatttcttgaacacacgtcccagataggtgatgctctcaaacccggtacggcttgcgatttcggaaacggaaagtgttgttgtttctaacaggctctgcgctttttttacccgcaggatgttgatgtattcgttgatgccgaagccagtcacttcatggaaggaacggctgagataatacttgctgatataaaactgctcggcaaggctgtccagcgagagcctttcctgaaagtgatcggaaatgtagtctgagatttggtagactgcatcgaactttccgccgctggccttaccctcctgcacatcattcaggcaggcgacctgctgattgctgcgccggaagtagatgaagcctagaatcaactccgaaagaatagcggtctggctcataggctctgccttgtccagttcctccatgatttgcagaaacaatcggcgggtattcgctgtctgcttcggggtcagttcgtaaattccgtagtgcttgtggaagaacgcaccgatcttcagttccgggaacatcttatcgaccttttccacaatgtcccggtctacatagaggatcactcgctcgtattcggtttccgggtctcccacgatggaatgggacatatgaatctggccgctgtccacgagaatcaggttcccggcctgtgcttcataggcgcggttctcaaagaacatctgccgccgcccacggagcaggagataaatttcgtactcctgatggaagtggttgtaccgcatatcaaagtttgccggacgaaccatgtgttccaccataatgccgtttcgtttgcggtaatattgggtcgcatcaccctgaaccatgctgtgcagccatgttgttttcatgaaatgctccttttctcctgaacaggcggtgttcttgccttgattatgtcatatctgttcaggtttgacaagcatttgcaccgtggggcttacatcaggcccagcgtagtaggcagccactcgctcagagcagggatgtatgtgaccagcatcagtgagatgaaaattgccacaaagaacggaaccagacttttcatcacattctccagacgttgctttgccaacgagcatcccacgaacaggacgttgccaacgggaggagtgatggtgccgccgatctcggaatcgcccgcctgaccgtgcgccagccggagctggatcttgtcactgccaatgctgccgtttaccttgaaaaaggtggaaactccgattcccagcagcacgacgacaatgacggtcaacaagatttttgatgtcttttttattgtcattcctcctaaatgatttgctcgttcggtgcgacttcctgattataattatacagcctttggggccagctttctcgcaaagaattgcgaatgaagccaaaaattcaaacgatattgcgcctgtgttgtatacattcttgcgcttttctctattgttttgctgaaatggacaatatttcttgccattcttctacatacaaataattttttagaccaattcgtccgttttttctgcgcaatattgtttgagcgcaaacagaaaagagccacccgtagtttgttacggatggctcttgacatgtttcttttataaaaggctgccgctcagttcagccggaacacctgctccagcttgggctgtgcgccggtcacggggtccatttccagttccagaatgtccttcatgtacgcgttccaacggtctaccaccgggctttctgcctgcaccttctcggcataggcaacacccttttcgcactcgtaatagccgaacagttcatcgttgcagtaaaagatgctgtaattgcagatgccggcgtctttcagaactttaaccatctccggccagatctccgcgtgacgtttctggtattcagccttgcagccgggcttgatgcggcctttccatgccatgtgctccatgttctgctccttagttgagaaacttctcgttcagggtcacaccaaagtcgcgggcgatggcgcgcaggtcgtcgtcggtgatggtctgccggatgatgccgccgcccatggagagcaccttgacgtagatctctgcactcttttcaatggtgtgggccagaccaaaggtgatgtcaaagtccggaccggaagcaaacagaccgtgctgtgcccagatggcagcctgataagtcttcatcagctcactggtggccatggcgatatctgccccgccgggcaccatccacgggcagacacccacgccctccgggaacaccaccgggcactcggtggcgctctgccacagcgnnnnnnnnnngtcccggtcggtcaggggcaggatgtaggtcagggcgatcacgttggtggcgtggcagtggtagataacacggtttgcgccattggtggcggctttgcggacgctgtgattcataaagtggctggggaactcggatgtgggctttgcgccgtcctccaggccccagacaatgcgccagctgtcgcccttgtcgttgatctccacaataccgatgctgtgaacagggtccgactccacgttgcggaagaatttgccggagcctgtggtgatgaaatactcccccgccagattgtccgcctgcacccccatgttcacccattcgcggggctgctcgtcaaagaagaggcggcactgtgccacttcctcttccttcatgcggtaggtcaggttgccgccgttgcgctcgtgccagccctgcagccagccatcgttgcacatccgcataaagccttttacgatctcaatatccagaatacccatgataaatacctctcttttcctcttcaaacttaattatcgggtgatgatgtccacaggaacatcgaagatctttgccactttcagaatggtgtcgatgtgacggccggtagccgcagccatgtggtgggtggggccagcctcgctccagcggttgcagaactcccgtgcgccgcaggtaaagcgggtgcgcatattggtgtcaccaaaggtgaagatggggccgggttcgttgacgccctcagccatcacgaacttgaagtgaccgtccttgtcctgcgtaatgcccagataggtcacagggccaagatgggggtagaactgggtcaggtagccgccgccggtcttgccgtggaacacaggcacgatcttcatggtgggcttcttctcggaaatgtcagcatgtcaaaatgacacaattcctctagggatgtttagcataatggtgtatgactatgttttatatttatcgggcattagaggatctttttgctaactcttacaaaaagactataaaagacttaccatcttctgcaaagcatggtatatacattatacgaaatattgctttgctgaacatattaccgttcaatgatgtataaatgaaggtgcccgccatgaccgccgtgatctatgcccgctattccagcgacaaccagcgtgaagaatctatcgaaggccagatccgggagtgcacggcctatgcggaaaagaatggcatcaccatcgtcaagcactatattgaccgtgccatctctgccaagacggacaaccgtccagagttccagcagatgataaaagacagcgacaagaagctgtttgacattgtgctggtctggaaactggaccgctttgcccgaaaccgctacgacagtgcccggtacaagacccagctgaagaagaacggtgtcaagcttatgtctgccaccgaggtcatctccgagggaccggaaggcatcattctggaatcggtgctggaaggttatgccgagtattattccgctgacctgtctgaaaaggtcattcgtggcatgaccgaaaacgcactgaagggaaagttcactggcggtgccattccctttggctacatcatcaacacagaccaccgctttgaaatcgacccgttgactgctccctttgtggcagaaaccttccagcggtacaacgatggccagaccatgcgggaaattcgggattggctgaacgaaaagggcgtcaagaaccagcgtggcgggctgatgaccttcaacaccattcagcatatgctgaacaatcgccgctacatcagggagctgaaattccgggatgtggtcgtgccggatgccatcccgcccatcatcccgctggaactgtttgaggatgtgcaggagaagatcgccaaaaacaagaaagcccctgcccgtagaaaggcagaggatgactccctgctcaccaccaagctgttctgcggctactgtggtgcactgatgtttggcgaaagcggtacgagccggacgggcgaagtccaccgctattataaatgcgctactgccaaaaagcataaaggctgcaagaagaaaactgtccgtaaacagtggctggaagatcttgtggtcaaccagaccatgcagcttgtcaaggacgattccgccatggaatccatcatcgccaaggttatggaactgcaaaacaaggaaaacaccaacattcctctctatgagaaacagctccgggatgcggaatcgggtatccagaatatgctcaatgcgattcaggctggaatcctgaccagttccaccaaggagcggctggagcagctcgaagaaaccaagcgtgagcttgaagcccgcattgcggaagaaaagctggcgaagccgaaagtgaccgaagagttcattcggttttggttgctgcggttccgcaagctggatatgcgcctgaaagaccagcggcagacactggtggataccttcatcaatgcgatttacctgtatgacgataaggttttgataaccttcaattataaagagggaacacagaccgtcacctttggagaagcgtcagaagttgcatccgagggaagtggttcggatttggattgcattcctgcaccacaaaaaagacagctatcaaaagctgtcttttttgttttacatgactatttccctttggctgcaacggcggataacaggacttgaacagcactgcaacgccgcaggcggggcaacgtgtaggaatgtctaccaggaggactgccactgaaatagaaaatccgaaccttttctcgataggagaagggttcggattttttggtttattggttcttggatcgtgccggaatttacggctcaggcaaggctttcaatttttcgagccataaaagctccgaaaaagattccggggcttgtatatttttcagagagctattttgcaacagtccggaacggatttactttccgagtacaacggagagcctgatctccttttccgtctcgctcaggtcaagagcgccgccatcggcgacggtcacgtgcagctcatagagcgtaccggcggtaagttccgttacagccttgccgtcctcgtcggtgatcgaccacagtgcaggatcgacctttgccagcttgccgtccacgccataggcgtagagggtcagaccggaggtgctgccggacaggttattcatgcggaaagctaccgtggtgttgggatgtacgttgcggacggtcacagtgttgcgccagcttgcaacggtgccttcgccgccgtcctgcgcaaaccgctcctgcgaaaggacgtttcttgccgcctgatcaagctcgaccttgcggtagggcatttcgggcagataaacaaaccggtcctgcagacgaagcagttccagatagcccgtcgggcagtagagcgcgttgccgctgttgccggcatacataccaatggccatgttgttgtagccgtatttgttggaaacatccatcgtgaaaacagtctcaccagtttcaaaatccagaatgatgtactgccacatcccggtggtcacatcctgcacatagccgtagatatagcccgttgcggtggaaagcttcatgatggaggtgtcgctcaggtcgttccggctccagatgctcttcatctcgtagccgtttgcggtctttacggtgtccatgcgctcgatgccgggggcgatcatgatgttgcccttcatgagccagttctggtcgtaaatattggcgtagctctggatggaggagtcgttgttgggatcagccagacctgcattgcccgcaccgaaccagttgcagacgatggtgctgacggtgccctcgccgtcgtcatagacgatggcagagttctcaacggctacctgatagccctcgggcaggtcatccagcaccggggtgcttgccacgacctcgccggtcttcatatcgagtgcaagaaggtttacagggtcctgattatccgtgaacagcacaaggttcggtgtcagcgtgggcgagcaaccgccgccccacgcaagaccgccgccggtggtcttatcgccttcgccgctcacctttgcacccgcgctctcatagggcgtgcaccatacaacgtctacgccttcttctgcgcgcagaagatagcagttctggttggtcaggaccaccgcaccgtccttggaggcggcgatgccgttctcggcaccctcgccgggggtcagttcgtggacaaaaacagcctttgaaaggtctgtctgctcgccgttcaggatcgcatcaatggccgagcgggcaatatagccgatgacgccctgctgctggcgctgcggataaatgcggaagccgcccgttgcaaaccagaggtttccgtcatagtcaaagaccacggacagaagattctgcgtcagttcttttccaagcgcagcctcggcggcagctttgatatcaatgtccagcaccttttcaaattccggcagaacattgccgttttcatccgttgcgcggagcatcagcacatggttgttgctcgtggggcagacgatgcggttggattcgtcaaggaaggtataggagctctggataacgtaaccgccgccgtcatgcttctttggcgagaaatagccgagcgtctttgtctcttcggcgttcaggtctcggatggcgatgccgcccagcagcggcacaacggcatgaccgtagctgtcaaagtagatggcgggcgaagcgttcgcgttcgtcgtctcataggaaacgttgatctccggatagatggcaagcggcaggatctcatccgtcgagtcggtgttgtagccatcgtgatgaatgtttgcatcgctcttggccatgtaagggttttcctctacctgcttggggttcagagcctttaccggcagcgccgcagaggcttgttccgctgaagagggctgtaccgcagcggacggggcagcgggctgcgaagcggcagcactgtctgccggcgtctgtgttccgccgcaggcagccatggaaaggcacaatgctgcggtcagcgacaggcttaacgcagaatggacgatgtttctctttttcataaaccgttctccttgttgtgtttgttgcggtcagaccagtgctgctccgcctgatttttttccatccagccagatgcggaatccctgccgtaaggcggcttcggtcaccggctccagcagaaaatagtctgcacgcaaccggaaggcatggagcgaaaaatccagatcgctgcaccagataatgcgtgtctgtggacaaagcgcgcgcagatgctctactgcattcaatccgtcgacccccggcagggcgatcacggcatttgtcagcggttcgttgcgtgcagcctcaaaaaagctttcctgatcgtggtaacagtccattttcgggaacaagcaatgttcggcgcagaaccgcgagatctgctctgccagaaaagcttcctgcgccctgctgcttgtcagcacggcaattcggtacactgcgtgcctcctttctcttgcgccatcgttggcgttctctgctttcagtatacggacaggcatggtcttttcaagccatttagcacgaaagccccttttccgtcacgaaatcccattttcggctgcgacataaccgggcaactgtgctataatcaggatgaaagagtttataaaggaggttggaagctgtaaaacggcttcctgatacagcatgaggatcgcaatcgtcgatgaccttgataccgagcgcacactgctgaaggagcgcttggtgcggcagctgagtcagcgcggcgcagatgcagagcttttagagtttgacagcggggaagcctttctggcggcagaaaaagagcagcgctttaccgctgcatttctggatatttacatgaatggtttaagcggcatggatgcggcaaaggaacttcggaaaaccgatgcagactgccttctggtttttaccaccacctcgacagaccacgcactcgagggctttcaggtgcgggcatttcattatctggtcaagcccttttctgaagccgagctgtccggtctgttggatgaaatgctcgcaaagcttccgcgcccggagccggttctggtggtaaaagtcgacggcagcgacatccgtttgtgctatcgggatattatatccgccgagcacttcgcccacatgatcaacatccgcaccactgccggcaaaacgcttgctacgcgccagagcttcaaagcgttcaccgagccgctcaaaaaagatccgcgcttttttgtctgcggacgtggcgcgatcatcaatatggagaatgctgccgattttcaggctgccgccttctgtatgacggacggcagccgcgtctatgtcagtcaggagcttttgaaagctgcccggcaggcctttatggaatttctgctgcaaagggggcgtgtgggttgaaggatgttctgcgcccgatcctggagcttaccgtcgtgtttcccggtttgctgcttgcgtattttccggtaggttcctatctgaagctgccgcccgcaaagcttgcagcaggggcggtgccgctgctgctcgggctttgccttggcggcgggctgctttgctatcattttggcatttcaacggcgttctccgtgctgcttattacgcttacagcaatttttttgtatcgcagaacgctgcggatctctctctggaaatccggaaccatcgcgcttgcggtctgcgcggtatttgcgtgcctgaacagcctgtcccgggccgtcggcacggcaatcgtgatccggatgcagctgccgccgggcaagccgtggttctgctttggcgcctgcatcttttataatgcggtctgctggctgatcactgccgcagcctattatcccgccacccacgcagtacgcgcgatggtggaggatgacaattttgcgcagacgtggtatgtgttctgggtactgccgctggtgttcatcctgctgaacctttttataaccccgcgctaccagataacgctccggacagggcgggtcttgcaggtctacatcgttatgagcatcgcgcttttgtttctgatgttcatgttcaatgcgatctttctgctgatggcaaacagccttaaccggaatgcgagattgcagcaggaaaaccagtttctttccatgcagcagcagcgctatgaaagcctgaaagccgccattgaagaagcccggcaggcacggcacgatatgcgccaccagctgaatcagatctccgcactggccgaggcaggagatctggacggcctgaaagcctaccttgcaaaaacggtctcccggatcccggatctggatatgaatttctgcgaaaaccgtgcagcggacagtgttgtcggccattattgcgcccttgcaaaacgcgagggcattcccttttgtgcccggcttaacttaccacaggtgcttcctgtggacgagatggatctgtgtctggtgctgtctaatcttctggaaaatgcatttgaagccagccttcgcactgcacccgcccggcggaagatcgagatcaccgcgtatgtccatgccgagcggcttcttctggtcgaagtggaaaacgcatttgacggcgtagttcacgaaaaaagcggggtgttccgctcttccaagcgaagggaaaacgggatcggcatccagtctgtccgccatattgcagaaaagaccggcggggcaagcacgtttacctatcagaacggcattttctcagccaaagttatgctctgcggataaggagccttttgctttggcggagatttttacaaaaaattcacgctggcagggttgccgccgcataccggatgtgctatgatgaggtgcaaaatttgaagcggagcgatggattttgatttgtcaagctcgcggaatcaggaggaactacccatgcagaagaattatgtacaggaaattctgagcatcattcacagcggtctgcccaaggcggaactggctgaaaaactgtctgattaccatgaaaaagatctggcggatgcgttggaggcgctgacccccgccgaacgccagtcgctctattccattctgggtgtggataccgttgccgagatctttgcctatctggacgatgccgagccgtacctgaaggagctgcccagccacgaggtcgccaaggtcatttccaacatggactcggacgatgcggtggacgcactggaggatcttgacgataccgataaaaacgagatcgtcaacaagctggacaaggactcggtggaagatgtgaagatgctgctctcctatgacgaggatgagatcggcagcaggatgaccaccaactacatctccatcaaaaacgatatgaccatccggcaggcgatgagcgagctggtaaagcaggccggagaaaacgacaacatctccaccctgtatgtggtggataaaaacgagcacttctacggcgccatcgacctgaaagacctcatcattgcccgggcagaggaaagcttggaaagcctgatcgtccgctcctatccctatgtcacagaccgggaacagatcagcgattgtatcgaccgcatcgtggactacgcggagcgcagcctgccggtgctgaacgatgccggtaagctggtgggcatcatcacctcgtccgatgtggtcgagctggtcgatgatgagatgggcgatgattacgcaaagctgggcggtctgaccggcgaggaggatctgaacgaaaacgtatttgaaagcgtgaaaaagcgtctcccgtggctgatcgcgctgctgttcctcgggatgctggtctcctcggtcgtcggcgcgtttgaatcggtggtagcggtgctgccggtggtcatctgcttccagtccatggtgctggatatggccggtaatgttggtacccagtcgctggctgtgaccatccgtgtgctggtggacgaaaatctgaccctttccaaaaagctgcagctgctctggaaggagacccgcgtgggtcttttgaacggtgccattctggccgtgatggccttgggctttctgggctgctacatccactttttcaagggctatgtctggacctcggcctttttgctgtccggctgcgtcgggctgtcgctgatcgtgtccatggtcatttccagtctggtgggcacgctgatcccgatgctgttccacaagatccatatcgacccggccgttgcttccggcccgctgatcaccacgatcaacgatctggtggcggtcgtggtctactatggccttgccatggtcgtgctgatcaatctgttccaccttgcataacgggtgcatcaaaaagggcgatccctccggggaacgcccttttttgctgcgcaaacttttgctaacaatgttaatactacctaacatcgtcagaaaatattgaaaacgcccgaaagcgtgctaaaatataaagataaagagcccgccccgctccgggcgcgggtacacagatgggaaatacagaaacgaggggtaaatatgtttgatacaaaaaagcttgcactgtttttgggcggtgtggtgttcggctctgccggtttcaaggtgctgtccagcaaggacgccaaaaaggtctacacccagaccaccgctgcggtgctgcggatgaaggactgcaccatgcagaccgtgaataaggtgcaggaggaagcaggggacatccttgccgatgcaaaggccatcaacgagagtcgcgccgccgaggctgcacaggaggtcatcgaggatacggctgaagaagagcagcccgcagagcagactgcacagtgatacaacgcagcggagccgcccttgggcggctcttttttacgcagaggggcaagaaaagcaatgaaatgtacgatcttacatgaaggcaggggacggatgcgggtgcacgtctgcgccgtgcgcatgacgctgcaccgggcagatgtgctggaagcctacctgaacgggcaggacaacatccagaaagccaccgtctacgagcgcaccggagatgtggtgctgacctaccggggcagccggaaggacgctgccgccctgctggcggcctaccgctttgacaacgaagaattagaggtgctggtcacctcccacgacagccggaagatcaatcaggaatatcaggagaagatggtcagccttgtgacgggccgggtgttccgcaaggtgttcctgcctgcgcccatcgcggcggcgtatacggtgtggcgctccatcgcctttgtctggaagggcgtccgctgcctgctgcaccgcaagctggaagtagaggtgctggatgcgctcagcatcaccgcctccctcctgcggggggattacagcaccgcaggctcggtgatgttcctgctgacggtgggcagcctgctggaggagtggacgcggaaaaagagcttggatgaccttgcccgcagcatggcgctgaacgtggataaggtctgggtgcgcaccccgcagggcgaggtgctggtgccgctgacccgcgtccacgccggggatgaggtagtggtgcgctccggcaatatgatcccgctggacggcatggtgctggagggcgaagccatggtgaaccaagccgccctcaccggagaatctatgccggtacgcaagaccaccggggctaccgtctacgccggaacagtggtagaagagggcgagtgcgttcttgcggccaaggcagagggcggtgccaaccgctacgataagatcgtggccatgatcgaggaatcggaaaaactcaaatccggcaccgagaaccgggctttgcagctggccgaccgtctggtgccgtggtgccttgccggtacggtggctacctacgcctttacccgcaacgtcacccgcgccatctccattttgatggtggacttctcctgtgcgctgaagctttccatgccgctggcggtgctctctgccatgcgggagtgcggggaataccacatcactgtaaagggcggcaagtatctggaagcgctggcaaaggcggacaccatcgtgttcgataagaccggcaccctcacccacgccaccccgcaggtggtgcaggtggtgcccttctccggctgcggggagcaggaggtattgcagcttgccgcctgtctggaagagcatttcccccattccatggcaaacgctgtcgtccgcgccgccaaggagcggggcatctcccacgaagagatgcactccgaggtggagtacatcgtggcgcacggcattgccagccgggtgggcggcacgcgggtggtcatcggcagcgctcacttcatttttgaggacgagggctgcaccatcccggcagaggaacaggcaaagttcgatgcgctggacccgcagtattcccacctgtatctggcagcttccggggtgctggcgggggtcatctgcatcgcagaccccctgcgcccggaggcggcacaggtgctgcatgagctccggaagctgggcatcacccagaccgtcatgatgaccggcgacagtgaccgcaccgcccacgccattgcggcgcaggtgggggtagaccgttactttgcggaggtgctgccggaggataaagccgcctttgtccgcgacgccaaggccgcgggacacaccgttgtgatgatcggcgacggcatcaatgattctcctgccttgtcggcggcagatatcggtatcgccatccattccggtgccgccatcgcccgggagatcgcagatgtgaccatccgcgccgacagtctggaagagctggtgaccctgaaggccattgccaacgccctgcaaaagcgggtgggcagcaattaccgctttgtcctcagcttcaactccgcgctcatccttctgggcgcactgggcatcctgcccccggctaccagcgcaatgctgcataacctttccacccttggcatcagtctgcgcagcatgacagacctgctggagcagaagcctttaccgtgaaaatggaacgccggagcgtccgcagacgctccggcgttccgaaattataaatagcttttccgctgaaaatgcccagagcatagcggagggcattcaaaatcgtcttagccaaaagggaggcgctgcacgatattgtgcggcggcctcccttttttgtttcagataaacctgcagaagcccagccagcagcctagcaggaaaaagagcagcgccttgcccagcaccggtagccacgggtgcttgcaaagagccaaatcccaccggtggatgttctgcttggggcaggtgcccacgcaggcttcacaggcgatgcactccccgctgcgcaggctgctttcctccagcttcaggcacaccgggcactgctgcttgcaggcattgcagcccgggatgcagccctcgctctgccggtgcagccgtgcaaagggcagcaccggcagcagggcgaacaccgcacccatggggcagaggaactgacaaaagaaccggggctgcactgccatgcccagcaaaataagcacaagcagcgcgatgcccacgccgaagccctccggcggcagacgcagtgccgtcaggcgggaaaacacctcccacgggcttgcgccggtcagcagcttttcctgccgggtcacatacagcgccaccagccctgtcagcagcagatatttgatcttctgcccccaaagcaccgcccgctccggcagacggagcggctttttgcggtggaacagctttttctggataagcccggacagtgcccagacggcatcgcccaagctgccaaaggcgcaggcgtacccgcagaaaaaccggtcgaacagcaacgtgaagccgcacagccccagcagggaaagcgtgaagctgtccgccgagagcacctcgcccgcaccgatgtgcagaaagagctgctttaccccggaaaacccggctacgaatgcgcccggcatggacacaaagaagaacagctgcaccccggcgcgcagccatgtacggcgttttttgtcccgctgacgcttctgcgccgccgttaaaggctttgcctgtgttttttccatcatcctgccgcctttcccagtgcgtcctctactgcaccgatgagcccttctgccgtgagggtggcaccggaaacggtatccacctcggcagactgcactgccagcatctcgtccagcaaaggcagcgcctgtttatagtagggcttgtcctcaccggaagcgtccagcaccgcaatatcggtcatttttccgttctggatagtcaccgacacccggatgacatcgccgaaaccaaaggcgctgccctcgtaggtgccgtcccggtagccgctctggctctgctctgcctgcgctgcgctctgcgcctgcaaaacggaagcgttgtaggcttccacttcggcaatctcctgcttgcgctggcttaccgccgcagcccggaccagcgccacctgctggtattgccacagtacccccaaaatcagcagcagattcaccgcccggaggagaaagttcttgtatttcattccgctgctccttccgtttcaggttcgggttcggtctcttcgggcggcagcgccgtctcggatgtcggcagcacctccgcagaagatgccggttccggttcagaatcgtccggtgtttctgccgggaaaagctgctgccacacttccttgaaccacgcggaaacagcgctcttttcctccggctgcaccacctccacggtgggcgcggtgaccggcgtttcctcgggttctgccgcttcggacggtgcggcttcttctaccacttcttccggggctgcctgctccggggcggcttcctctgccggggcgacagcggcctttgccaatgccagcttgaccgcgttcaggatgccggtggaggagtaggtggcaccggaaacggcatccacattggggctttgcccctccagaatggcggggatgacccgctttgcccgggaaagatattcctcctcatcctcagcgcttagaaccgtgatatcggtgattttatcctctgccaccgtgacctgcactgtaattttgccctcaaagcctatggcttcggcggtgtagatgccgtcaaggtaggtggagggcgttgtaaattcctccaccaccagcggtgcggcaggcttcggctgcggcggcaggggattattcaccacctcgccggtcagggcgttctgcaccgcgcccagaatgccccggctggtgtaggtggcttcggaaacagcgtccacctcccagctctgggcatccaccacggtggtcaaaagccgcttggcgcgccgcagaaactgctttgtctcgtgggaagcgtccagaatctccacctccgtgatgctgccgttttccatggtgacctgcacccggacggcaccgccgtagccccgggaagagccaacgtaaacgccgtcggcatagggcagcttgggcagggcttcttcctccgcttcaacggaagcggcttccgccggctgctccaccacggctgtcagtttttccggcacggcagccagcaccggcacggtgcggggcagggcaaaaagcacggctgccgctgccgccaccgccgggagcagctgcaccagcggcagcagtgtgttgcatcgttttttgttcattccaactcctcctgacacggaaaagcaaggccgcctgcataaagcgaccttgctttttgggtgttctgttttttgccggatcaggcagctttcaggttctgcacggcatcggtcaggtgggtcacctgctccagtgcagcggccttatacagggtctcgcggctcaaaagctccacgctctcggccagctcggtctccagattggcatagctgtcggcggtgtaagcggcctttgccttgctctgtgcttcggcgaccacagcctgcagggcggcgcggtcggcatcgcttgccagctcgtgcttggcaaggttctcggtagtggtctggaacttgaccaccgtatcggcgtagcccagtgcacggatggtgatggtccagtagccggtgccgtcagtgccctccggcagctggcagcgggcggaatcgctcagacccagctggatgcccatggacttgtgcatccagttgtcggctgcaaacttggtgccgtaggaggccttggcgtgggtgtaggtgctgtcgttgccgtagtaggtccacaccacagactgcatccgggagcccagctcgccgtagttgccgttcaggtccacacggataaactcgccaaagctgcccacgtcgctgccgctgcgcaggttcacggtaaggccctcggcagccttctgggcggcttctgccacgccggaaccggtgccggtgtgcgcggcagagaaggtgtagccgtcgccgctcttggttgcgtacttcaggccgttggtgttttgatccaccgcagcggtcagggcgtaggcggtcaggttcttttcagagtagccgcccgccagctggccgccgttttccaccacggtgtacttggagcagaaatctgcaaggtcgctggtggctacgcgcacaggcacatacttggtgcccagcacctcgtagtggtccatctgcacggtagagccgtcggccttggtaatggtgccgcggttccagcccacggtggtgccatcggccagatagatggtcttgccatcgtccgaccagtgagaaacggtgtagctgctgccgtccttggcgtagatgacagcagtgctctggaagctgccgcggtgcagaccgtggttgacggttgcgcgggagaccgcgtcaaatgcgccaaggtcctgctcttcgtggctgtccagctgcgcagaggcggcagtgctgccggcggcgtagaccttctcgtttgcccaatactcgtcccaagtcagggcagcataaagataggtgtacttcttgcccagcagaaaatcgaaaaagctgttttcctcctcggcaggggctgctgcaaaggcggtagcggtcagcaggctgaacgccatagccgccgacagcagcagggaaagaaatttctttgttctcatgaaaaatgctcctttcatcacactggcagggaataggaaacatgtagttagcattacctaacattgcgcgcaaagaaaaacctgcggggcaaagcccctcagatggttagggtaagctaattgacggaaattaagataacacgcatacaaagggatgtcaagaaaaagcagggatgtttattcaaacaaactttttggaacgggatagggaaaagcagctgcggcacgtcatctggagagcagtgctttggcggcttgtactctgcccccctgcgggcaaaagaaaaagcgacaacccgtgcaggtgggtcatcgcttttctcgtcccttgcgggacaggcagggtaaatgataagaaggtaaatgaagaaaatagcaaggtaaaaacaaaggcgcatacggagccgaagttgccgctccaaagagaagatgtatccaagcttcgcttttgttggatacaacataccactttggaacagaaattgcaagaggttttttaaaatttctccccaaaaatacgcgggaaatcgcatttttgtagaaacgcacaaattttacggaaagttcccggcaaactgacgaacaagcataaaacagaatggcagtcggaaaaccgcacagggacacctttataaaaccggcaggcaatggaatcaacttttgcagcctgtccggagcaaaagccttcaccctttgggggaagcctttattcggaaagcggtttttcgcgggatgtagcctgcaccgctttacaagcagccggtggtgtgttaagatggacacatctgctgcaaccggaagaatgcacgcgccgggcagcggtggcgtaccggaaaagcacccggcgccgggaggggagaaacgaatgacaaagctactgcatggcaatgaaaaaagcagcctgaccggcgggcgggagccgctgttcagccagaaggaactgctggtactggccatcccgctgctggtggagcagctgctggaagtgacggtgggcatggccgacaccatgatggtgtcccgctgcggcgaggcagccatctccggcgtcagtctggtggatatgatcaataaccttatcatcgtgctgtttgcggcgctggctaccggcggcgcggtggtggtaagccagtatctgggcgcaaaagagcgcgggaatgccgacaaaagcgccggtcagctgctgctgctcagcggcttgtccggtgtggtgatcggcgtggtatgctttgtgctggcccgccctatgatccggctgttctacggctctattgataccgacgtgctggacgcgggcgtgaagtatttgcagatcatcgccctcagctacccgtttctggcgctgtacaacggcggtgcggcactgttccgcagcatcggcaactccaaaatctccatgcagatcagctttctgatgaacatcatcaacatcgtgggcaacgcggtgtgcatcttcggcttcaaaatgggcgtggacggcgtagcatggcccagtgtggtgtctcgcgtggtggctgcggcgctgatcctgcgcaagtgctaccgggaggatgcggtgcttaccgtgcccaagaccctgcggctggacggcggcatggcaaagcgcattctggggatcggtatcccctcggcctttgaaaacagcctgttcgaggccgggcgcattctggtggtgagcatgatctccaccttcggcacggtgcagatcgcagccaacgccgtggccaacaatctggacggcatgggcgtcatcccgggcaaggccatcagtctggccatgatcacggtggtggggcgctgcatcggtgccggcgaccacgaacagaccgtttactacacccgcaaactgctgctgtgggcttacattaccatggggctttccaacggggcgatcctgctgttcctccggcagctggtgggcatctacgccctttccggcgagaccatggagctggccattacgctggtcactatccatgcgggctgcgccatcatcttctggccgctgtccttcgtgctgcccaacgccctgcgcgcggcaaacgacgtgaaatttaccatggtggtgtccatcctcagcatggcatgctggcggctgggcttcagctatctgctgtgcgtccgcatgggctggggcgctgtgggtgtgtgggtggctatggtcatcgactggacctgccgtgtgacctgctttgtgctgcgcttccgcagcggcgcatggaaaacaaaatatcaggcataacaataaggagaaaagcatgaaactgatcagctggaacgtgaacggcctgcgcgcctgcctgacccacggctttgccgagagctttgccgcgctggacgcggacatcttctcggtgcaggagaccaagatgcagccgggacaggcggattttgcgccggagggctacaccgaatatacctactctgccgagaaaaagggatactccggcacagcctgctggtgcaaaacggcaccgctggcagtgaccaccggcatcgggctggaacagcacgaccacgagggacgggtgctgacgctggaataccccgacttttatctggtaaactgctacacccccaacagtcaggatggactgaagcggctggactaccgcatggagtgggaggacgccttccgggcgtacctgctggcactggacgcaaaaaagccggtgatcctgtgcggcgatctgaacgtagcgcacaccgagatggatatcaaaaacgccaagaccaaccgcatgagcgcaggctttaccgatcaggagcgcgccaaaatgaccgagctgctggcggcaggttttgcggacagcttccgggtggtgcacccggacgaggtgaagtacagctggtggagctaccgcttccacgcgcgggaaaagaacgcgggctggcgcatcgactattttatcgtttcccggcgcattgcagaccgcatccgcgccgccgagatccacaacgagatcttcggctccgaccattgcccggtggagctgcagatcgacctgtaatataaggagaagccaatgctgaaaaattatcttctgatcttccttatctccatggtgcccatcattgagctgcgcggggccatccccatcgggctgggcatggggctgccggtgctgcccacctaccttttgtgcgtactgggcaatatgatcccggtgcccttcatctacctgttcgcccgcaagttcctcatctggggctaccacaagccccttatcggccccatctgccgcttttgcatcaacaagggcgaaaagggcggccgcgcactggaggccaaggccggcaagggcatgaccgtggcgctgctgctgttcgtgggcatcccgctgccgggcaccggtgcgtggacgggcacgctggcagcctccattctggatatgaaattcaaggacgtgttgatcgcctgcatgggcggtgtgctgctggcgggcatcatcatgggcttggcaagcgccgggctactgggtgcgctcagcgggctgtttgcggcaggctgacaaaacgcggacgcttttgtcgtgaaaaatgccggtagcttttccgcccggagtgtgttaaactgggtaacagttgtgaaaaccgggatctgctcccggtcagaaaggacgttatagaacatggatcaggcactgaatcagaaaattaacgcatacattgcggaaaacaaggagcagctgctgcaggacattgcagcgctggtcgccatcgacagcgtagagggcaccccggaggagggcgcacccttcggcgcaggccctcgggccgcgctggacaagacgctggaactggcagcaggcatgggctttgccacccgcaactgcgaaaactacatcggctatgccgagctggccggtgcggacccggaaaaatatctggccaccatctgccatgtggacgttgtgcccgtgggcaacggctggacggcagacccctttaagatgcgcattcaggacggctggctgctgggccgcggtgtctcggacgataagggcccgatgatcgttaccctgtacgcgctgaagttcctcaaggagcagggttaccagctgcgctaccccatccgtgccatcgtgggcgacaacgaggagacccacatgaacgatgtgaagtactatctggaaaactaccccgccccggtgttctgctttaccccggacgccgagttcccggtgtgcaacggcgaaaagggccacttcggcggcaagatcgtcagcccggtgtgcaacggcgtcattgcagagtttgagggcggtgttgccaacaacgcggtgccggaccgcgccagcgcactggtcaagaccgatatccgcaagctgaagaacgcccccaacatcacgctggaaccggaaggggacggcgtgcgggtgcgcggctggggcaaatccggccacgccgctatgccggagggcacggtgaacgccatcggtctggtggcggattatctgctggacaacggcctgtgcaacgatgccgagcgcgcttatctggaggcactgcgcaaactgcacagctccaccgcaggcactggccttggcatcgactgcgccgacggccccttcggcccgctgaccatcatcggcggccgcatctatatggaggacggcaagctggtgcagaccatcgacagccgcttccccacctgcaccaacggcgaaaagctgaccgcacaaatcaccgctgcgctgggcgagggcgcaaagctggaggatgtggatgctgccgagccgttctacatcgaggccgacagccccgccatccgcgcctgcatcgacacctacaacgaggtgaccggagagaacgccacccccttcaccatgggcggcggcacctatgcccgtcacttcccctatgctgtcagcttcggcccggagcatgaggatgtgaagctgccggagttcggcggcccgatgcatggtgccaacgaagctgcccccatcgacaagctgctggaggctgtcaagatctacattctggcgctgctgcgtctggaagagatcgacttctgaggtacggcatgaacgtgcttgtcattgacgggcagggcgggggactgggccgccagctggtggccgccctcagcgcccagtgcccggatatccggctggtggccgtgggcaccaacagcgttgccgcgcaggccatgcacaaggccggggcgcagtgcgccgccaccggtgagaatgccgtggtggtgaactgccgcagcgcggatatcatcgtggggcccatcggcatcgtcattgcagatgcgctgctgggagagatcacccctgccatggccacggcagtgtgccagagcagcgccacccgggtgctgattccggtgaaccactgtgaaaactatatcgtcggcgtgcccgaccagcccatcggcagtcttgtagctgccgctgtgcagaaggtgaaagccctctgcgccggggaaggctgctgaaaatttctacaaacaaacaggcggctgtacaaaatgctgtacagccgcctgtttagtttattcagcgcatattgctggtacggtgctccatcagataggtagcctgcaggtctgcgatgtgcagtttgaccgccagcgggtacttgtcgtaggcttccgagatggcaaaacagccgccccgggccgcatcgtcaaagccgcccatgtgccagcggatggcaaccgcctcctccaccttcagcttcataaaccgctcgatcaggaacacgctcttttcgccgtggccgtagggaaacagatcctctacactgtaaaagggcgctttttcccactgtccggtggcttcgttcttcacgttgcgggtgcccagcttgtagtagttggccttgcacaagtcgtgcagtagggcacagatggcgtaactctcctcgctttcgccctcggtgaaaaagctgtcgtgcagcgcgtggtagacgttcaggctgtgcatgcacagtccgccctcacaggctccgtggaagcgggtggaagccggcgcggtgaaaaaatccgtctttttgtccagccagtccagcagcttttcgccgcccgggcgggtgacatttcgctgccagatgtccagaaactctgcgcggtcgcccccgctcacagctccatgtcctccagaatgcccttgaggatggccaactcgtcgtggctcagggaaatgcccttgcccatgcgggtgccgtccggggaccagtcgcggatgtcgtacttgggctcgccgtcgttccagctgataaggttcagctgacgctcccagccgcggggacgctggctcagcacggctacacgctggacaacttcgtatttgatctctgccatattgcaaaacctgcctttatgtttgtatgctaccataataagggaagtgcggcgagatttcaacaggtaaactgaaatattttaaaaaatttttgttacgctcagccgtaaggggcgtcctcgcgccattccaccagctctaaaacggcggccgtatcctcgtccggggcggggtggcggctgtgcagcttctgctttgtgctgaatagcccgggcgcgtagtgtgccatcacgctggtctgcacgtccccggccagaaaggcggcggcattcttctgacggcaggccatgggggtgccgtcggtcatggggacaccgggcttttcgggctgcggcagctccggcgggggcagctgggtgccgggcgtgtccggcgcagccgggggctgcaggggcatactgcccagcggcggggcattgcgggtgctgcttgcctgcggggcggcagcggtgccgggctggttttccagttcgcggcggatgaagggttccagagaattcatcaaattcacctccgcccctagtgtgccccgccagaagcgttttacacccgcagctctacggtggagccgccggtgcgggccttgtgcaccaccacctgccggtcgatgcggtccttgagcgcccccacatgggagatgatgcccaccagacggtcgccctcggtcaggccggagagcacccggatggccagctccagcgattcctcgtccagcgagccgaagccctcgtccaggaacaaagtgtccagccggatgcccccggcgctgctctgcacctcgtccgaaaggccgagcgccagcgccagcgaagccttgaagctctcgccgccggaaagggtctttacgctgcggcgggtgccgttgtagtggtcgatgacgccaaggtccagcccggactggctgcgctggttctctgcaccgatgcgctccagctcgtattgcccggcggtcatctgcatcagccgggtgttggcatagcgcagaatgcggtccagatagttcatctggatgtaggcttccagtttgatcttctgcttgctggtcaaagtgccgcccgccgtggcagccagcgcgctgacccactgccaccggctttccagcgcctgccgcgcttcggcggcagcgcggtactgcgccgccgttttgcggttgggcagcaattgtgccgaaagctgcttttcccggctgcgcagggtctcccgcgcggcggtcagttcggtctgctgtgcggtaagctcctcggcgctgcgggcgggcagttccttttgggcggcggtctgctgtgcggtcagcgcctccacagcggcctcggcggcggcaacggtctgttcagcctgtttcagcttgcgctgtgccgtgtccataccggtgcgcagggtgctgcggtcagcctccagcttgtccagcgccgcttgtgcgtccgcgcgccgggggtagggcagggcggcgcgccgctctgcaatctggccttccagcgcgtcagcacttgcattctgggcggcggcgctgcggtcggcctcggaagcggactgctccagcgctggacgctggcgggtcttggcttgccggtcggcttccagctgtgccttgcggcggcagtcggcctcggcctgtcggcactgtgctttgcagtctgtctgtgccgtctgcaaagcggcattctcctcggccagaacgttggtcatcagggcaaaggtgaggggcaccgtgccctccggcgtggtaaagcgctccggcagcagggtctcggcgtcccgccggagagaagttttcgcctcgttggcggcggcaagggcgctctgggcggcagcgctggcgttctgcgcctgccggtcagcttccgcagcggcctgccgtgcggcttccacctgtgcctgcgtgggcgcagtatggggcagcagggcgcgggcggggtgatgggtgctgccgcacaccgggcagggcgcaccctcggtcagaccctcggccagcagcccggcctgtgcgtccaagaatgcccgttccagcgcgtcccgccgggcgcgggcttcgtcctgtgcggcggcagcggtgcggtaactctcctgcgccttgtgtgcagttttggcctgtcgctggcagtccgcaaggcgctgttccagctttgccagcgcttcgccgcgctgtgtcaactgggcgctgcggttttgcagcgccaacagccgggtgtccgcgtctgccagcgcggcaagctcggtctcagcggcggcaagggcagcgttcaggctgtccagctgggtgcgccgtttgtgcgcctgcgccgccgccagccgggcggcgtcccgcgcttcggtctgctggcggcagagggtgtccagcgcgtcataggctgcaagggcgctctgcgcctgcgtcacctgcgcggtcagggcatccagctgcgcagcgtccccggcgtggcggccggcctcggcgcgggcggcatccagtgcgggctttgcggcggcaagctctgcctgacgggcagccagctgctgcgccagccgctgcgcctgtgcggcggcgcccagctgctgctgtaccgtgtccagctgggcttcggtggcttgcagggcggtgccggcttcttccagcgctgctgcctgccgggcagccagggcgtccagcatggcaagcgccgtttccggtacggtctgggcacacagggtgcgcagcgcctcggcgtccgggtcctccgggctgaattgcaacccgcccagcagactgtccagtttggcgttctgggcggtgcgctgctggttcagcgcggatgcttcggcctgtaagcgctcttgcagttgggcgtagcgctgggtgcggaacagcttgcggaagatgcggctgcgctcctcggtggaggcgttgagcagctttgtgaactgcccctgcgcgatgagcacaatctgagaaaactggttgtagtccagcccgatgatctcctgcacggcggcggtcacgtccttggctttggtcaccggcgggcggtcatccgggtaggtcagggtggcatccgccttttcggtggtcatgccctcgccccgcgccttgggacgctgatactccgggttgcggcgtaccgtgtagcgcacgccgtgcacctcaaattccagctccacaaaggtgggggtcttgtcgtctgcgtacttgcagcgcagcatggagccctcccggatgccgctgctggaatgatcgtacagcgcataggtgatggcgtcaaaaatggtagtcttgcccgcgccggtgtcgccggtaatgaggtacagcccgcctttgcccagtttttcaaggtcgagggtggtctcggcggcataggggccaaaggccgaaagggtcagtcgcagcggtctcatacagtatcgccctccttccagatctcctcgatcagttcctggcagaatgccgtctgctcggcggtcaggggctgattattttgcagctggtaaaaggccgccagatgttccagcggggagatgctctcggtgcgctccggggcgcagatctcctgctgctggcgggtgcgctggttgtcgtagtccagctgcatcaggttggggtagatgacccgcagccgcgccagcgcatccggcacatcctgctcgtcggtcagggtgatgtacagatagtcgtccacggcggtgccctcgtagcagcggcggtcggtcagttccatgtagctgccccgcagcccgcgcaactcgtgccggggggtcaggggcgcggtggtgatgtgcacctcgccctttgcacccagctccacaaaggtagcgcttttgcgctgccccgcctccgagaaggagtacttcagcggcgtgccgcagtagcgcagggtctcccgccctaccttctgcgggctgtgcagatgccccagcgccacatagtcaaaggcatcaaacagggcggcgtccacgctgtccaccccgcccaccgagggttcctcgctctcgcaggcggcagcaccggccacgaactgatgcgccaccagcacgctgcggtggccgggggcgggggtgcagtgccgcagcacgcaggcaagggcgtcgttgtagctctcaataggctcgtccggccagacgtgccgcaccatggcgggctttaaaaagggcagtaagtacacatccaccgtgccgtgggtgtcctgcaaagggatgggctgcggcgcgccggtgaacaccgggctgacgtagacccggctatcggccagcagggcagagccaaaggccacacggtcggcagaatcgtggttgccgctgatggcgaacaccggcagcttccgcgccgccagttgggtaaggaaccagtccagcagccgtaccgcttcggcagggggaacgggcttgtcgtaaagatccccggccagcagcacgccgtccacaggggtctcatccagcaaagtcaggatctcttccagaatataccgctggtcctccagcatggaaaactcgcacacccgcttgcccagatgcaggtcggacaaatgcagaaaacgcaaacaggaacaccgcctttcaaaaaatgctttgccctattatagcgcagccgccgctgcacgcgcaaccaaggagaacagaaaaacggacaactgctgtttgccgttgcgaccccttctgtgaaaatgggacaccggagcgtctgcggacgctccggtgtcccgaaatttaaaatgattcttccgctgaatatggccaaagcgcacgcggaggccattccaaatcgttttacggcctgcgtatatcagaacatcttttcccaagtggcgtagcccacactgccgtctgccgtcaggctgttgcgccgctggaaccgctgcacggcggcagcggtggccgcaccgtacttgccgtcatctttcagccgctcgcccagagaattgagcttctgctgtaccaaacgcaccgtgccgccggaagagccagtgtgcagcacgatgccggggtagggcactttcagcccgtgctttgcggtgtagcgggtgtagagcacgttccatgtgttctgccccaccttgccgtccatgttcatcttgttcttcagctggaactcctgcacggcacgctgggtgcttgcgccgaacttgccgtctgccttcagcgcatcgtaccatgtgcacgcatcgcgtacgccgttgagccacgtctgtacaagtgccacgtccggcccggaggagccgcgctggagcagggaataataaccgggaatcgccatagagggatccctcctttccctccatgctatgctccggcgggacacggcgtcaccccgccagcagcacagtctgccgccgggcagtcagccggtgtgcccagtccaccagccggaaccgcaggatgtactgcccgcagacaaggtcgttctccgcaggcagggcgtagccgccctgcgcaaagctgcacagccccgggtacagcacacaccaccagttgcgcccgccgccgctgccgatgtcgatgcgcacggcatcgtaccgcccggcgggcagctgaccagtggggtagcgccgggcgggaaagtacatatttacgagatacacccgcaccggggtacggatgccctgcgcggccaatgcccgctgcgccgccagctggaactgcaaaagctgccccgctgcccacgctcgcgcctccggtgcgctgtgcgccgggcactgctgcatcacggccagcacggcgtcccgcacccggagcttggcgctctggtcggctacggcatcactggccgcccggatgtgcagccgcagggtgtcggcgcacagcgctgccccggcatccagctgggtgcgcccccagcacagtccctgcaaagcgccgcacagcgcaaagcccgccagcaagctggcacacagcagccgcatctgccggacggaaagcggttttgaaaaccagcgaagcataaaaaacagacccctcttctggaaatgataaccagaggatgggtctgctgcggcgggattatacaaaaaaataaaccctctcagttattgctgcgcaatgactgagagggttcgtatcagttcttcaaagactgcatgggcgcaggcagacggccgccgcggttgatgaacaccgaggggtcgtggctgtttaccggcatgatggggccgtagcccagcaggccgccgaagtccagcacctcaccggccttgcggccgatggcggggatcacgcgcacggcggtggtcttgctgttcaccatgccaatggcggcttcgtccgcgatcagggcgctgatgacggcaggggtggtgtcaccggggatgatgaccatgtcgatgcccacagagcagacggcggtcatggcttccagcttttcaatggtcaggcagccgatctcggcagcgtggatcataccggcatcctcgctgaccgggataaaggcaccggacaggccgccaacgtggttggaggccatcacgccgcccttcttcacagcatcgttcagcagggcaaggcaggcggtggtgccgcagcagccgcaggtctccagacccatctcttccagaatgttggccacgctgtcgccgatggccggggtaggagccagagaaaggtcgatgataccggcaggcacgcccagtgccttggaggcaaggtttgccaccagctgacccacgcgggtgatcttgaaggcggtgcgctttaccagctctgccacctcatcgatgggggcgtccttgggcagacgtgccagcgcggcgcgcacagcgcccgggccggaaacgcccacatggatctcgcagtccggctcgccggggccgtggaaagcaccggccatgaaggggttatcctccggggcgttgcagaacaccaccagcttggcagcgccgatgcactgacggtcggcggtcagctcgctggccttcttcacggcctcacccatcagcttgatggcgtccatgttcagaccggccttggtggcgccgatgttcaccgagctgcacacgatgtcggtctcggccagtgcgcgggggatggactcgatcaggcggcggtcaccggcagaaaagcccttgtgcaccagtgcgctgtagccgcccacaaagttgacgcccacctttttaccggcggcgtccagcgtctttgcaaagtccacggggtctgcctccgggcaggcacccagcagcatggcaatgggggtaacgctgatgcgcttgttgatgatgggaataccgtactcggcgctgatgcgctccacggtggagacaaggttcgcagccttggtggtgatcttgttatagatattctcgcaggccttcttggggtccgggtcgatgcagtccagcaggctgatgcccatggtcacggtgcgcacgtccagattatcctgcgtgaacatctcgatggtttccaggatatccccggtgttaaacatactcatagcggttgcgggctcctttccggctcagatggtgtgcatggcgtcaaaaacttcctgacgggtcacgttgatctgcatccccatctcggcggcaagcgcatcggtgcgcttgtgcagctggtcgtggtcaacattgcagttggaaagatccaccagcatgatcatggcaaacatcccctgcaggatgctctgggtcacatcctcgatattgatgttcaactcggtgcacagaccggccacctttgcgacaacgcccacggtatcgtgtccaatgacggtaatgaaagctttcatggtttccaccctcgttttccttatagtgattggtgccgccaaagaacccggcacacgcttacccttccagtatagcagatttagcaaattttgaacacactttttgtaaaaaagagcagaatacgggggcaaaagacattctatataaaaatcaagtgcaatctgctggggcttgtgctatacttatacataatttcccgcggatttccgtgtagagggttgataaggagtatatgacaatggaacagcttttgaagattctggaaaacaacgcccggctgcccgtggaggacattgccaccatgctgaacaaatcccccgccgaggtggcggcgatgatggatcttgcccgggcgcagggcatcatcaagggctacaagacccttgtggactgggaaaaggccaaggtgaaccgcgtggaggcggtcatcgagctgaacgtcagccccaaaaagagccgcggctttgatgagatcgccgccaccatcgccgcctttgacgaggtggagagcgtgctgctgatgagcggcgggtacgacctgcagctggtgatcaagggacagaccttccaggagatcgccctgtttgtggcaaagcggctctcgccgctggacgatgtgctgtccaccgccacccattttgtgctgcgcacctacaaaaaagaggggcggctgtatcaggatgaagaaattgatgaaagagagtgcacggtgctgtgatggattatgataaactgatcgcgcctgccgccaaggccatgcgcccctccggcatccgcaaatttttcgatctggccgccgaaatgcccgagtgcatcagccttggcgtaggcgagccggactttaagaccccgtgggctgtgcgcgaagccggcattgaaagccttgagcatggccgcacccgctatacctccaacgccggcttgaaagagctgcgcgccgagatcagccggtatctggagcggcgcatgaacctgcgctacgaccccatgcggcagatccttgtgaccgtgggcggcagcgaggccattgatatgtgcatccgcacgctggtcaagcccggggacgaggtgatcatcccggagccctgctttgtgtgctacgagcccatcaccaccctgtccggcggcgtgccggtgcacgttgcctgccgtcaggaggacgagttccgtctgcgcgccgaggcgctgaaggctgccattacccccaagaccaagctggtcatcatgcccttccccaacaaccccaccggtgcggtgatggagcgggaggatctggaagcagtggccgaggtgctgcgcggcaccgatatcatggtgctgtctgatgaaatttacgcagagctgaactacggtctgcggccgcacgtttccattgccaccctgcccggtatggcagagcgcaccatcgtggtgaacggcttttccaaaagctacgccatgaccggctggcggctgggctacgcctgcggcccggaggcggtcattaaaattatgaccaagatccaccagagcgccatcatgagcgcccccaccaccagccagtacgccgccatcaccgccctgaaggagtgcgatggcgaaatcgaccggatgcgggacgagtacaatatgcgccgccgtctggtggtgcgcagcttcaacgatatgggtctgacctgcttcgagccccggggcgcgttctacgccttcccctgcatcaagagcaccggcatgagcagtcaggagttctgcacaaagcttttggaacagaagcacgttgccatcatccccggcgatgcctttggcgcttccggcgagggctactgccgcgtttcctacgcttacagcgtggagcacctgaccgaggcgctgaagcgcatccgggagtttttggtggaaaacaacatctaccacggcaactgaggaggaacacagatggaacggcgagagcggaaaaacgcagtgactgtgctggccccggccaagctcaatctggcactggatgtagtgggcttgctgcccaacggctaccacgcgctggacatgaccatgcagaccatcaccctgtacgagcgggtgatgctgcgccgcagcgccgggctcagtctgcgtctgccgggcagccttgtgcagcccaacgataaaaatactgccatcaaggcggcgctggcgttcttccactacaccggcctgctggcgggggtggatatcaccatctacaaaaacaccccggtgcgggcgggtatggcaggcggcagtgcggacgcagccgccgtgctggtgggtctgaatgccctgtacggcgcaaggctttccatgagcgaattgtgcgcgctgggcgcaggcatcggtgcggatgtgccctttgccctgatgggcggcacctgccgggtgcagggcgtgggcgacctgctcaaggcactgccccctgtgccggactgctggttcacggtagtgatgccggactacggcgtgtccaccccggaggcctttgccgcctatgatactgtgggcagcagcacccacccggactgtgaggcgcaggaaaaggctatccgcgccggagacctggacgccgtatgtgctgccgccgggaatgcactggaagagtgcagcggcgcaaaagacaacgaggcgatcaaaaccctgctccgggcccacggcgctgtcaccgccctgatgaccggcagcggcgcggcagtgttcggcgtgttccgggacgaagctgccgccagagccgccgcagcggcagcaaagcggcagtggccgcaggtctacgttgccaagcctgaccgcggcggcgcccgggtgattctctgaaaaagtataaacctccttcccgcagggcatactggccccaaaggaaggaggtcttttttgtgcagaccttttacaaaatctgcctgctgctgctcattgtgggcggtgtgaactgggggctcgtggggctttttcagttcgaccttgtgggctggctgctgggcggcagcacctcggtgtggtcccgcatcgtgtttgcgctggtgggcttagccgcccttggctgcattccggaactgttcagcgaagaaccggaggaagaataacaaaacggctgctgcactttgcgtgcagcagccgtttgcgcgttgcagcgcttccggtaaaaaagcgttttctgcgtggcttactggtcgttatccacatcgtcccagccaatgaggtcaggcagggtcagtgtttcgtccgagcagtggtggcttgcgcggcgctggtcggcggccttggtgtgcaccacctcgcgtgcaagctcccggatggcaatgcagtcctccggcaggtcggtctggctgcggccggagtgggtgaacaggatcttgccctcgtggcctacgatcagggtcatgggcaaaatctgcggggcattgcggtcgtagtgataaccggcatcccgggcacttttgtagatgcgctgggcagaaaagctccagctcaaaagcccgcgtgcctgctccacccccagatagctgtacagcacacccggcgcatcgcagatgatggggaagggaaactccttcccctgtgtagcctcggccaccgcgcggggcgctgagcgcaccacgcacgccagccgcacaccccgcagccgcggcagggtctttaagtagcgggtcaggtattcccgggtgaccgggtggtcgaacccgggcagaaagatcatgcacaggggttcggtgcccgcacacagggcgtaaaaatcgttgcccggggtggtgggggtgtcaaaggtgaaccggggaatggaggtaccaaccagatgctcagagctcatgccgcaattgcacatcctttcaaatggtgataaaaaaatccacagccgtgccctgtgtttgcaggggcacaagcggtggattggattactataaagatcccgcccggtcgtctgcggtcaatcaaacctacccttacggacaggtgggtgccctgtctccggaatcacgcttcctcatcgaacctccatggtcgacccatggcggggaggtctgcaatccaccggagaactccgggctcccgttgaatgattagtaggatcatacaaaccgcaacaaatcgagccgggcaggaagtcttgcacgggtcaatccgtcaaaggacttactcgatatcgtagtcctcgctcagacgctgctcgaacagcttgctgacttccatcagcacctcgtcatcctccacaacgtccagatattcgccttcgtcgtcctccccgacactcaggatcaccagctgggcgtcctcgttcaggtcctcttcgttctcggcgtattccacaacagccagataatgcacgcccttgtggtccagcgcatcgatcacctcaaaagtgacctcgttgccgtcctcgtcctcaagggtcatcaggtcgggctgatattcttcctcagtattggggttcttgatctcgtcagacataatacgctcctgtattgctttaagccaaaaagcagttgatgcagcgggctgcgtcccgcttggtctgcttatagtgtagcgtgttttgcgcagttcgtcaagatgctttttcgcacagaaatcattggataaattttcacgcaatttcctctcgcactgccgcgcagaatatggtatactactggttaaagcttttgcgctgcgctgtgcggcgttgtagtacaatatatggaacagggagcgggagtatgttgaaaaaattcggggcagtctgtcttgcggcggtgctgctgcttacgggctgcacgctgcggccgcaggaaaacggcagcaaggtccagagcatcagccgcccggcggtggaatccgctgagctgcagttcacccacccggcagcaggggacaccgttgcggtgttcgatacctctgcgggtgttttccgtgcggtgctcttcccggaaaaggccccgcaggcctgcgataacttcatcggccttgtacagcagggttactacaacggccttaccgtgagccgggtggagaaccagttcgtggtggaagccgggcagggcgcagacggcaagggctctaccatctggaagggcagccgctacccggtggaagcatcggacagcctgcaccactacgccggggcgctgtgcatgggcgtggacgcctccggcgcgtgtgccagtgtgttctatgtggtggaatcgctgccgggagaacagtcggtaacgcaggaactggcagaccagatgaacgccgccggttaccgcgccgaggtggtatccgcgtaccagacggcgggcggcgcaccctatctggactacaccgacacggtattcgggcaggtgtacgagggcatggacatcgtggataccatcgcccagaccgctgtggacgaaaaccagaagcccaccaccgatatcaccatcaacagcgtgagcatcgagacctatcagggataaatagtaaaagatgcctgtgcgtgagcacaggcatctttttttacatctccccggggtgctccttgcgccatgcaaggtagtcctctaaaatcaccgtggcactgaccgaatccagaatctccttgcggcggctgccgtaggtgccgctttcgtccagaaggtcagcggcggcgcaggtggtctgacgctcgtcccacatccgcaccggcaggccgctccaaagctccacggtctttgccagcttgcggctcttggcggcgcgctcaccctcggtgccgtccatattcagcggcagaccgatcaggatcatctcggcttcgatctccttggctacctcgcagacccgggcggcaaccttgttgcgcgcctttaaggtgatctggggcgtaatggcggtggtaagaaattcggtgcggtcgcaggtggcaaggccggtgcggctgtccccgtagtcaacggctaaaatcttcatacaaagtccctttccggtgtgcagaatgtttttttcagtgtaccacagcggcggcgggattgcaaagaaaagcggtggttttatctccgctttcgtgttacaataaaggcaaaaatcaatgagcgggaggagaccgaaatgctgaaactggttctgggcacttccggcagcggcaagaccaccctgctgtatgcccgcatccgtgcccgtgccgaggcggggaagcgcagcatcctgctggtgccggagcagtttacctccagcaccgaagcacgcatctaccgggagctgggggatgccctttccggcatggtagaaagctattcctttaccagtctggccgagcatatccttgcgatagagggcggcgcggcggtgcagaccctgaccgatgccgggcgggcggtgctggtgcgccgtgcgctggaggaattgcaggataacgtgcactactactaccgccaccggcgcagcgcagccttttgccagatggcggccgagacgatagacgagctgaaaagcgccgggctttccgggcagcagttgcaggagcttgcccgggactgcggcaccgagagcgcgaagctgggcgagctggcgctcatctttcagggctacgaaagcctgctggcgggcaccggcatggatcctgccgaccgtctggagttggcggctgaccgtctggaagctgcgcttgcccgggacgagctgccggactttctgcgcgagcgcgaggtgttcattgatgagttcgacaccttcaacgcgcccaaaaagcggctgatgggcgccatgctggctgcactgcccgccgtgacggtggcactgtgcgaggacggcgcacccatgcagcccggggacctggaactgttctccggtgcaaagcaggtggcggcgcagctgcgccagctggcgcgcaaaaacggcgcacaggtggccgccccggagctgctgcggcgggacctgcgccataaggatgccccgggccttgccgcgttgaccgagctgctggagacaggcagctgcaccccgccggaaagcgccccggagctgcggctgtttgccgccgccagccgggaggaggaggcccgctgtgccgcagccgccatccgccgcctgatgcggcagggtgtgcgctgcggaaaaattgcggtggtctgccgcgatatcagtctgtaccgggctgcggtgcggtacgagttccgcatggcagagatccctctgtactgcgacgaacccaccaccccggagttcagcgcccccgccacggcggtgcgggcactgctggcattgctgcggggtgcggacatgaccgagcagctgaccgtgctggccaagaccggcctgtgcgacctgaccgagccggaggtctgcgcgctggaaaactacgcctacacatggtcgcctaatgcagcggcgtggcgggcagaatttaccaaaagtccccggggcttcggtgacgccgaactgaccgaggaagatacgctgaacatgacccgcgccgagaacgcccgcaaaaagctggtgacggcggtggataccctgcgcagcaaggtgcgcagcgccaacgcggagcagatcagccgggcgctgtatttctgcctgaaggagctgggcgcagaggagcagcaagccgcgcaggtggaggatatccgcactgcccggggcattccggcggcagaggaagccgcccgcgagtggaatgtggtgatgcagctgctggacgagatggcgcggctgctgggcagtcagggcatcaccgtgccggagtacgaggatcttttcggtctgctgctgcgctcctctgaccttgggcacatcccgcagaccttggacgcggtggtgctggcaagcgccggtaaaatgcgtttggatgcgccggactatgtattcgtgctggggctggcagagggcgaatttccctgtacccccgcagaaagcggcctgctgacccacgccgaccgcgacctgctgatggcaaaacagatcgacctgccggactgctttgaaaaccgtgtggtgcgggaacaggtctgtttttataaagcccttaccgccccggcaaaggggctgtggatgagctggccgaaagggcagggacagaccctgtgcgctgcgctggaacccatcgtggaggcattgcagcccgccgcaccgcagctggaactcattgaccttgccgccacccccgcagacggcttagacgtgctgggcggcggctggccgctgaccgaactggaacgtgccagcctgaccgaggcgctgcgcacccccggtgagggagtgcaggcaccccggggactggcactgttgcagcgcatggagcaggacccgccccggcaggtgcaggatctgcccacactggaaacgctgctgggcaggcggctgcacatctcgcccagccagctggaaaaatactatacctgccgctacggttactttttgcagtatgtgctggggctcaaaccccgccgccgtgcggagctttcggccgaccagagcggtaccctgatgcactgggtcttgcagatggcactggacccccaccccggggcagacaacccctgtgccgggctgcgcccctttttggagctggatgatgccgccatggctgatcttgccgctgcgctggtggacgagtacgcgcggcgctatctgccggaggataccgcacgctttgcctatctgctctcccggctgaaaaagagcatgaccagcctgttgtgctatctgcgggacgagcagaaccagtcccaattcaagcccgtggcctgtgagctgaagatcggccggggcgaggatgccgtgcccgggcaggtgtaccgcctgtcagatgggcgcacggtgcagttggtgggcacggtggaccgcgcggacgagtggatcgaggacgacggcacccgctgggtgcgggtggtggactacaagaccggcagcaaaaagctggacttgaaggaagtctactgtgggctggactgccagatgctgctgtatctgttcagcctgacccgggatgccggcgggcgctttaccggcgctcagccggcgggcgtgttgtatctgctggcggacccagccccccagaccctgccccgcgggcaggctgcccgggcggtagagtaccagctggacggccttgtgcgggacgagcagaagatctttgacgccatggatgcagacgaaaccggcaagtacctgccctttggctaccgcaacggcgcacccagcccctaccagaaggacaagcgggcggacagtgccaagctcagccgcatccagctgcatctggacgatcttgttacccagatgggcgagcagctctacggcgggcagatcgatgccgagccgctggtggtgagcagcagcaaaagcccctgcacatggtgcgattacagctttatctgctgccatgagaccggggtgcacgagcgtgcgctggaagcccctgcaaagccctttgaacccgaggaagaacctgaagaagaggaggaacagccgtgagcggacccaaatggaccccggcgcagcaggccgccattgccgaccggggcggtgcgctgctggtaagcgcagccgcaggcagcggcaagaccgccgtgctgactgagcgggcggtgcagctgatcaccgacccggagcacccggtcaacgccgaccggctgctcatcgtcacctttaccaatgcggcggcggcagagctgcgtgcccgcatcgggcaggcgctgctgcaccgcagccagctgcagcccggcaacgccatgctgcgccgccagcggatgctgttgcagcgcgcgcccatctgcaccattgatgctttttgtctgagcctgctgcacaagcactttcaggcgctggatatcccgccggattttgccccggcagaccccggtaccgtgcagctgctgcggggggcggcactggccgaaacgctggaaaacgcctaccgcgacccggatttctgcgcctttgcagacctgtacggcaagggacgcacggacaagcccgcaggcgatgccattttgcagatctacgattttctgcgggcactgccggactacgaccgcaagctggatgagtttcttgcgccttacgagcaggaaaacggttttgccgccacctgctggcatgatctgcttctggccgaagctgcccgctgcgccaaggctgcgcgggaactgctgacggcagcgctggccgactgccgggcggattttgcacaggagcaggcagctgctgaggaaaaaaagaccccatccgcccgggcaaaggcacaggccgcggtggcagaaaaatacgaggaagccggtacaaggctggaaaaagccgccgccttctttgcgcaggcggagcagctggccactgccggacagtgggacccgctgtacgacctgcttaccccctatgtgctgggtatggaggaagcccccggcctgaagggcatgaaaaagcgtctgggcggcgaccacaaggcggagatcaagacccgctcggacgaagccgccgctttgtttgagcagatgacccagctcatctgctgctccgaggccgaggccgagaccgaccggcagatcaccctgccccggctgcgggcgctgtttgccgccgtgcgggacttcgatgcccggttcacggccagaaaacgggagcgcaagctgctggaattcagcgattttgaacaccttgccctgcggctgctgcgcaccccggagggaaagccaactcccttgtgcgagaacatccggcaggactacgctgcggtgatggtggacgaatatcaggatacgaacgccctgcaggatgccctttaccgctgccttgccgccccggcgggggataacctcttcctagtgggcgatttaaagcagagcatctaccgcttccggcaggcagagccgggcatcttccggcaaaagctggacagctggccgctgctgccgggcgcaaaagcccgtccccgcccgccggagggcaccccgggcacggacgcactgctggcgctggatgcaaatttccgctccgcaccgcaggtggtggcgggcatcaactacctctttgagcagctcatgaccccggaactgggcgataccgcctacggagacgggcagcgtctggtctgcggcgcgcccggggaatatcagggcagcgtggaggtgcagtttttgccggacgatgagacggaaaccgatgcaggttggatcgcggaacgcatcgagcagctggtttctgccggagagccggtgcgggagggcagtaccacccgcccggtgcggtacgaggactgctgcgtactgctggcagcgcgcaccgagttcccggcgtatgtggaggcgctgaccgcccgaggcatcccggtatacgccgacgcccgggagaacctgatgcttgcgccccacatccgccccctcatcgccctgctcaaggtcatcgacgacccctcgcaggatatctatctggctgctgccatgctgggtcctatgttcggctttaccgaggatgaccttgtgcggctgcgcgcccgcagccgtcaggtacaggccgagccggacaaaaagcccgcccgcatcagcctgtacggcgcactgctgctggcactggaggacccagccgacgacccctttaccgagaaggtgaaggacttctacgcccacctcaccgccctgcggcagatggcgcgcagcgccccggcggagcagctgctggaagaaatttttgcctccaccggttatctggcggcgctgggcgtgctggaaaatggtgcccgccgccgagaggatgcccgccggtttgcctccttctgcgccacttccggtacaggcggcatctcggcgctggtgcgcgctattgatgccgccgcgcaggccggcagcaccggacaggacactgtgcccagcggggtgcaccccgggtgcgtgtctatcatgaccatccaccgctccaagggcttgcagttcccggtggtgttcgtgggggatacggcgcgcaagttcaacgcttcggatatccgtcagccggtgctggtgcaccgcagctacggcgcggggctgcggctgcggccggaaaacggcgagggcgcttacaagaccgccgcctacaccgcgctggccgctgtccacgccagggagctgcgcagcgagcagatgcgccttctgtatgtggcgctcacccgtgcgcaggataagctcatcctcaccgtgcccctgagcagcggcaaaactgcaaagccctttgccaaggcggcggcttttctggctgccggggcgggggctacgctgcaccagcaggccaacagctttgccgactggctgcgggcggcgctgcttgtgcatccggacggcggggtgctgcggcagctttccggcaaccgggaactgctgtttgtgcagaccgaaagcgtgatgaatatcaaagtgtgcgacgaagccgtgcggttgtctgagaaaccggatgcagatacggcggacgaagcgccggagactgatttggcactggtggagaagctgcgacagggctttgcgtggcagtacccggcggcagcgcttgcgcaggtgcccgccaaggtcagcgtgaccagcatcgtgcacaaggccgaacagaccacgctggagcgcccgggcttcctttctaaggacggcctgaccgccgccgagatgggcaccgcactgcacgcctttctggagcacgcggactttgcccggctggctgcggccaaggctgcgggcacgctggacacggccatcccggcagagcgggaccgtcaggtggcggtgcagctgaccgccccggagatcgcggaaaagctggacgcggtgtgcatccgccgctttgtggaaagcgaggcctttgcaaagatctgtgcggcgcagcaggtgctgcgggagctgccctttatcaccgcgctgcccgctggtgccgtgctggcggcgcagggacacgaggaactgcccgctgccgcagatgcgcaggtgctggtgcagggcatcgccgaccttgtgctggtgtatccggaccatctggagctgctggactacaagaccgaccgccgcaaggccgagagcgactttttgcgcgcctaccgcgcccagctgaacctttacgccattgccatcgaaaagcgctttgcaccgaaaaaggtgacctataagggcatctattcctttgcactgggcaaactgatcgaggcgtaaaacgattgaaaatggcctccgctgcgctctggccatattcagcggaaaagttattttaatttcgggtttcaggaaagtctgcggactttcctgaaacccattttcaccagaggggtcgtaaatcgaaacagcatctgcaacgcctgtttcctttggaaacagcggcgttgcgggcaaagctacctgttttactctacggcctttcccgtgaaaatagcgtttggagcgctccgcagagcgcgacaaacgcgaaatataggtaattcttccgctatttatggccagagcgcaagcggaggccattcaaaatcgtcccgctgaatggaaagtcatattttttccaaagaacgcataaaaagtgcttgacagggcagataaagcgtggtagaatagccaagtaaagaaagcagctacggcctgtgccgcgctcgccttgcgggaggatgtccccgggctatacccgaaacagcagcttattcctttgcgaatgctgcggctttgtgtgaaatttcgcgcggctgtccagaatatgggcggccgcgttttctatgccaaatattgcaacactatggattttgtttggaggtgcattcattatcgctaccgctggaaagtcgaaggaactggagatcaacggccagatccgtgatcgtgaagttcgcctgatcggtgcagacggcgagcagaagggcgttgtgtccattcaggtggccatgcgcgctgcagaagaagccgggctcgatctggtaaagatcgcaccgcaggctgtgccgcctgtgtgcaaggtgctggactacggcaaataccgttttgaacagcagaagaaggagaaggaagccaagaagaaccagaaggtggtcgaggtcaaggagacccgcctttcgctcaatattgacaccaacgacttcaacaccaagctcaaccagactgccaagttcctggcagccggacacaaggtaaaggtttcgatccgtttccgcggccgcgaaatggcgcacagtgctctgggcgcagacgtgctgaagcggtttgccgaggctctgcctcaggcatccaccgataagccgcccgtgctcgagggccgcacgatgtccattctgctgatcccgaaacccaataaggactaattttaggaggaaactaaaatggctaagatgaaactgaagacgcactccggcgctaagaagcgctttaaactgaccaagaacggcaagatcaagcgcggtcatgcattccgcagccacatcctgaccaagaagaccaccaagctgacccgtggctaccgtcagcccagctacgttgataagaccaacgcagctaccatcaagagcatgctgccctacgcctaagagcgagccgcaggtacacaaaactttctacgagatactaaaggagatataaaaaatggcacgtatcaaaggcgcaaccatgacccacaaacgtcgtaagaagatgctgaagctggccaagggcttctacggctgcaagagcaagcactttaagatggccaagcagcaggtcatgaagagcggcaactacgctctggctggccgccgcatgaagaagcgtcagttccgcaacctgtggatctgccgcatcaacaacgcagttcgtcctctgggcatgaactactccaccttcatggctggcctgaagaaggcaggcatcgagctgaaccgcaagatgctgtccgagatggctatcaacgatcccaagagctttgccgctctggtcgagaccgtgaagaacgcctgataaagaccttgcatcgtgacgcccgcgcgtatacgcgggcgtccgttttgtatccgggcattttttgcggccagggaaacaaggcaacggggcagcgccctgccgcagaaatctgcggcagacgctgccctttttctattgtatccaaagcatacacacctgttcaggaggaacgcatggacgaaaagatcaccagccgggaaaacgcaaaaataaaatacgcctgccgccttgcttccggtgcagcattccgccgcaccgaggggcgttttctggccgaggggcgcaagctgtgcccggaacttgcccggggcgcagagctggagaccctgttttataccgaaaatgcgctggaaaagtgcccggagcttgccgctttgccgggcgagcactatctggtagaggatcatgtggcggacaagctggcagacgtgggcacccatcagggggtgttcggggtgttccgcaccccggtgcacactctggaggaggtgcgccccggcgggcggtatctggcgctggagcgggtgcaggaccccggcaacgtgggcactttgctgcgcagcgcggcggcctttggctttgacggcgtcatcctgagcgagggctgcgccagtgtctacgcccccaagaccctgcgcgcctccatgggcgcggcggtgcgcatcccggtcatcgagaccggtgccatgccgcaggccatcgccctgctgcgggaaaaaggcatcacctgccttgcggcggcgctgtaccagtcccagcccctcagcgcggcaaaggccgggtatcccggcggcgtctgcgtggtcatcggcagcgagggacagggcctgaccgatgaaaccatcgccgcctgcaacagcacggtgcgcatccccatgaccgaccgggtggaaagcctgaatgccggcatcgcgggcagcatcctgctgtggcacttccgggaggagagcctgtgaccgggcagaccagcctgttcccgccggagcctgcacccgacccgctgctgtgctggctgtggctgtcgcaggtgctggggcctgccagtctccacgccggaaaggtgctggacgcctttggcggcgcacaggaggcatgggaggcgcgggagaccgaggagttccggcaggcagcaggggatacagcctttaagcgtgcagcacagctggatgcagaaaactgccacacgctggtgatgcagtgcgatgccctgcgggtgcgcatcctgccctttgacgacccggactacccgctggcgttttcccgcatcccggatatgccgctggtgctctactgcaccggcgacccccactggctcaacgagcccggggcggtgggcatcgtgggcagccgcaagcccacggaatacggcctgaacgcagcggcagatatcggcggtgaactggcaaaaaacggagctgttatcgtcagtggtctggccgatgggctggacagcgccggacaccgggcggcggtaaagaacgactgccccaccatcgcggtgatgggcgtacccatcgaccgcacctatccggcagccaatgccgccctgcgccagcagatcgagcgcaagggctgcgtcatcagcgagtacccgccttacagtgaatatattggccctacctgctttttgcagcgcaaccggctcattgcggcgctttcctcggctgtactggtggtggaagcgcgggaaaaaagcggcaccatgtccaccgttgcccacgccgagcgctacggcaagccggtgtacgccgtgccggggagcatctactcccccaactccgcaggcacgaacggcctgctgcgggacggacgcgcccgggtagtggccggtgcagccgacctgttggcggcgctggggctgcatacccggcaggcagcaccggcggctgcaaagcagcctgcgcccctgagcgacaccgaacgccgggtgctggcgggcatcggaccaaaacccgtgggcatcgaggagctgtgcgtgagcaccggcctgcctatgtccgcgctgctgggaaccctgatgaagctggaactcaccggccgggtgtacaagcagccggggcagcggtatgtgctgcggtaaaattgtggaatatttccgctggtaaagcacacaacagctgtggtacaataatatgagcgaatgaccgtgcatccctttgggggcacgttgcagatagaggagaaaagaagaaatggcgaaactggttatcgtggagtcgcctgcaaaggcgaaaaccatcggcaaatatctgggcgatgactacgaggtcaccgccagcatgggtcatatccgcgatctgcccgcatctcagctgggcattgatgtggagcatggctataccccgcaatacatcagcatcaagggcaaggaaaagctcatcaaggagttgaagagcaaggccaaacacgccgacggcgtgctgctggcgaccgacccggaccgcgagggcgaggccatcagctggcatctggccaatattctggggctggacccccacgagcccaaccgtgtcacctttgacgagatcaccaaaaagggtgtgaaggagggcatggcccacccccgcgccatcgacgaggatctgttcaacgcccagcaggcgcgccgcgtgctggaccgtctggtgggctacaagctcagcccgtttctgtggcgcaaggtgcgccgcggcctgtccgcaggccgtgtgcagagcgtggcggtgcggctgatcgacgaccgggaaaaggaaatcgaaaactttaaacccgatgaatactggaacgtggacgccaccctgggtgccgggcacaaaagctttgtggcacgccttgccacggacgccaacggcaaaaagctgctgcccaaaagcgaggccgaggcccgcgccattgaaaagggtttggagggcgcaagctatgtggtgagcgagctcaagcgcggcaagcgcgcaaagcagcccactccggcctttattaccagtaccctgcagcaggaggcctcccgccggttgggctttacagccacccgcaccatgcgcgccgcccagaccctgtacgaaggcgtggacattgccggacacggcatgatgggtctgatcacctatatgcgtaccgacagtctgcgcatttcggacgaggctgtggctgccgccaaggagtatatcgccggtgcttacggcgaggcgtatatctgcccctataagcgcacatggaagaccaagagcgccacggcagcacaggacgcccacgaagccatccgtccctctgtgccctccctgaccccggacgaggtggacaagagcatcagcggcgacaccgcaaagctgtaccgcatgatctggagccgctttatggcaagccagatggcagactgccagcaggataccgtgtcggtcaccgtcagcgcggcgaattaccacttcaaggccagcggctacaccgtgacctttgatggctttaccgccctgtacgaagaagccaccgacgaaaaggaaaagaaggaaacgaaccttcccccgctggagcagggacaggtgctcaagctgcgggagttgaagagcgagcagaagttcacccagccgcccgcccgctacactgaagctaccctcatcaaggcgctggaagaaaacggcatcggccgcccctctacctacgcgcccatcatcaccaccatcatcgaccgcggctatgtggaacgcgaccagaaaaagcttaagcccaccctgctgggtcgggctgtggacgggctgatgctggaacagttcccccacatcgtggacgtggatttctccgcgcagatggagaagaatctggataaggtggaaagcggcaaggccgactggcgcaagaccgtggatgacttctatcagggctttgaggccagtctggagcaggccgaaaagaacatggagggcaaaaaggtcaaggtgccggacgagccctccagcgaggtgtgcgacctgtgcggacgccccatggtcatcaaggtgggcaagtacggcaagttcttggcgtgcagcggcttcccggagtgccggggcaccaagcgccttgtcaaggataccggcggcatctgccccaagtgcggcaagggacgtctgctggagcgcaagagctccaagggacgcatctactacggctgcgagcgctacccggactgcgattttatgacttgggatatgccggtggccaccaagtgcgaaaagtgcggcagcaccctgttccgcaagggcggcaagctgtactgcgccaaggagggctgcggctttgagatgccggtgcccaaaaaggactgaaccggcagatggaaaggcttcccccggacggggaaagccttttcagagaatacgctacaccctccctctttggcaaaagctcccccctcgggggagctggcattgccgcaggcaatgactgagagggttggattaaaggaaagactaaatgaacgaatataaagtaactattctgggcgcgggtctggcgggctgcgaagcggctctctggctggcgggtaagggcgtgcaggtagagctgtacgagcagaagcccgtccacttttcccccgcccacaaaagcgagggctttgcggagctgatctgctccaacagcctgaaggctgagcggctggactccgcctccggtctgctgaaggaagagatgcgccgcatgggcagccggctgctgaccgccgccgaggagacccgcgtggccgccggcggcgcgctggcggtagaccgcgatgccttcagcgccgctgtcacccgcatggtggaagcgtgcgagaatatcaccgtccaccgggagcaggtggaaaccatcgacgagagcgctcccattctggtgtccaccggcccgctgaccgacggcgcactggccgatgagatcggacgcctgaccggggacgagcggctgcacttctacgatgccgttgcgcccatcgtcaccgccgaaagtctggactacagcaaggtgtttgccgcttcccgctatgaccggggcgaggccgattacctgaactgccccttcaacaaggcggagtacgaggctttccatgccgcacttgccagtgccgagcgtgcccccctgcacgactttgacaccggcgccgagcagagcgcaaagcccgacccggatgctcatggcaaaaaggccgataccgtcaccgtgtacgagggctgtatgcccattgagatcatggctgcccggggtgccgacaccatgcggttcggcccgctgcgcccggtgggtctggtagaccccaacaccggccaccgcccttgggcaaatgtgcagctgcgcgcagaaaataaggagcgcaccctgtataacatcgtgggtttccagacaaatctcaaatggggtgagcagaagcgggtgttcagcatgatccccgggctggaaaatgcggagtttgtgcgctacggtgtgatgcaccgcaacacctttctggatgcgccccgggtgctcagcgcccagctgtgcctgaaagaacatcccaacgtgttttttgcagggcagatcactggctttgagggctatatggaaagcgccgcctgcggtctgctggcagcacgcaatctctacgcccgcttggagggcaaacagctgcccccgccgcccgccgataccatgtgcggtgcgctggtgcagtacctgaccaccgagaacaaaaacttccagcccatgggcgcaaacatgggcatcctgccgccgctgcccgccgagacccgtccccgggacaagcggctgcgttacatggcacaggccgagcgcgctgttgccagcttccagcactggctggaggaaactgctctgtaaggcaaaccacctgaaaggagaaaacaggtatgaagatcattgtggacatgatgggcggcgacaacgccccgttggctgttctggaaggcgctgcacaggccgtcaaggagtacggcgtgcagctcattggcgtgggcaacgaggcgctggtgcgcaagaccgccgccgagcacaacattccgctggacggtatcgaactggtgaactgcaccgagaccatcgagatgtgcgacgagcctgcccgcgctatccgccagaagaaggattcctccatcgtggtgggcctgaatatgctcaaggagggcaagggcgatgcctttgtctctgccggcagcaccggtgcgctgcacgttggcgcaagcctcatcgtgcgcaccctgcggggcgtcaagcgcccggcactggctaccatggtgcccgcaaagcagcaggcttatctgctgctggactgcggtgccaacgtggagtgccgcccggagatgctgaccgcttttgcggtcatgggcagctgctatgtgaacaaagtagagggacgtaaaaaccccagtgtagcactggccaacaacggtgccgaggagagcaagggcactcccgtgctgcgggacgcccaccagctgctcaagactaccccgggcatccgctttgtgggcaatatcgagccgcgtgatgtgcccaacggcgaggtggacgtggtggtctgcgacggttttaccggcaacgtcatcctcaagctgaccgagggcgtggcaaaaatgctgctgggaatgctcaagcagatgttccttgcaaaccttggcggcaagctggcttatctgctgctcaagggcggcgttaccgacctgaagcaccagatggacagcgaggaatacggcggcgcgcccttccttggcgcaaagcagccggtcatcaaggcacacggctcctccaaggcaaagggtatcaaaaacgccatccggcaggcaaagatctgcgtggagaacgatttgtgcggaaccatgcagtccgcactggacgagctggccgcagcacagaaaactgaggaataaaagggagtaaaaacgaccatgagccatcagttggaaactatcatcggttacaaattcaaaaacccggaactgctggaaatcgcgcttacccacaccagctatgccaacgagagccgcaccccggtcaagcacaacgagcggctggagtttctgggcgacagcgttttgcagatcgtatccgcagactacctgttccacgcctacgccgaccgcccggagggcgacctgacccgcatccgcgccagccttgtcagcgagagtgcactgttccagtttgcgcaggagatcgaccttggcgagtatctgcgccttggccgcggcgaggagcgctgcggcggccgcacccgtcccagtgtggtgtcggacgccttcgaggccgttattgccgccttgtatctggacggcggcatggaggtggcgcgcaagttcatcctgcccttcatcaccgagggcaagcacgctgaggcggactacaagacccgtttgcaggagatcgtgcagcagaacccggaagagcgcctgagctatgtggtggaaagcgagtccggcccggatcatgacaagcattttgtggtggcggtgcgctttaactccgaccgcgtggcgcggggcgagggacgcagcaaaaaagccgccgagcagtgcgccgccaaggaagcgctcaagctgctgggcgtgataaaggaaaagtaaatggtattcaaggaactggagatccagggctttaaaagttttcccgataaggtaaagatcagttttgataccggcgtcaccggcgtggtgggccccaacggctccggcaagtccaacctttcggacgcagtgcgctgggtgctgggcgagaccagttcccgccagctgcgtgccgccggcaaaatggaggacgtcattttcggcggcacccgcaagcgcagccccatgggctttgcgcaggtgcggctgacgctggacaacgccgctcacacgctggatgtggacgcggacgaggtgaccatcggacgcaaatactaccgctccggcgacagcgagtacaccatcaacgggcaggtatgccgtctgcgggacgtgtacgagctgctgctggataccggcatcggcagggacggatattcggtcatcgggcaggggcgcattgcggagatcgtggcagccaaaagcagcgagcgccgcgagatctttgaagaagcctgcggcattgccaagtaccgctaccgcaagaccgaagccgagcgccgtctggccgcagcgggcgagaacttggagcgcctgcgggatatccttggcgagctggaaagccgagtgggcccgctggaaaaagaaagcgccaaggcgcagaagtttctggaactgagcgcccagcgcaaaacgctggaagtgaccctgtggaccgatggggtgcaccgcgcccgggaggctgtgcgccagcaggtgcgggactacgagaccgcccagaccgactacgagcgttttgaccgggagaccaaggccgccgagcaggaggctgaggagatccgtatgcaggcacagcagctgacggttgctgtcgagcgcctgaatggggatatccgcagcatcacccagcagatcagcggctccgaaagccgcatcgccgtgctggaaaacgatattctgcgcaacgatgagagcgcggcttctttgcagcaggagatcgccgccgggcagcaggacaccgccgaggcggatgccgccttgcagcgccaccgtgccgtggcaaagaccatggaggctgcgggcgaaaagcttgcggcagagatcgaagcgctgaatgccgaacttgcccggctggcagatgccagcaccgccagcggtgcccgcaaggacagcctgcgggcagagcttgccgaccacaccgcaaagcgtactgaggcacaggtggcacaggctgccgccgaagccgccggagataccgcccggcagcgtctgcccgcgctggaacagagcgcccgggatgccgccgcacagctggaagaaacaaaacaggatctggccgataccgtaaaataccggcggacgctggaggaaaacgaaaagcagctgggcaacatccgctccggtctggagctcaagctgcgcagccgcaaggccgcgctggacgaagccgatgccgccgagcagcggctgggcagggaactggatgccgcccggcagcgcctttcggtgctgcgggagctggaaaagaatatggacggctaccagaactcggtgcgtgcggtcatgcgcgccgccggagcccgccgtctgcggggcgttctggggccggtatccaccatcctgaaagtggagcccgggtgcgaggttgccatcgagaccgcactgggcggtgcgctgcagaacatcgtggtggaaaacgaagccgctgccaaggcggccatcgccctgctgcgcaatgaccatgcaggccgtgccacctttctgccgctggataccgtgcagcccggcgtgttccgggggcggctgtccggcacggcacggctggcgtctgcgctggtgcaggccgacccccggtacgagaatatcgtttcgaacctgctggggcgcattatcgtggtggaggatatcaacgaagcctcccgcgtggcgcgggacaacggctaccacaacaaggtggtcaccatggatggacaggtcatcaatgcaggcggcagctttaccggcggcagcgtgcagcgcagcgccggtctgtttacccgcaagcaggaaatggaagagctgcgcctgaaggcggccaagctgcaaaaagactgccttgccgcacaggaaaagactgaccagtgtaaagagcaggcagacgctttgcaggcagagctgaccgccaccgccagcgagcagatcactgccgccaacgaccgggtgcgtgcagaggcggagcagaagcggctggaagccgccgctgcccagctggaaactgccgtgcagaacgcacagcagcagatggacgccttgcaggctgccttgaacgacagccgcgcaaaggcggataccgctgccttgcagcaggcagagttgacggcgcagatcgagcagctgaccgccgagctgagccgcattgcagagggcagcgacagctttctgacccagcaaaaccagctggcacaggcgctcagcgccaagcggctggaacaggtgacccgccgcaaggatgcagagctggcttacagccagatcgccgcgttggaacagcgtgccaaggacgccgctgcccgccgcaccgcgctggaagaaagccttgccgcccttgccgcccgcagcgaagcctgccgcaccgagatcgcagctatccgcaaggccaagaccgacagccagaccactatcacccaaaaggagcaggccatccgcgaagccaccgaaaagcggcttgcctgccagcagaaggaaacggaagcgctggcaaaagcccgcaccgcctccgacagccgcgaggagatgggccgggagatggcgcgtctcgccgagcgcaaggccgctgcagagaccgagtacgatcagaccgtagcaaagctgtgggacgagtaccagctctcagtcagtcaggccgaggagctgtgcgtggagttcgacagcctgcccgcgctgcgggcacaggtggccgacctgcgcggcaagatccgcgcccttggcagcgtgaacgtaagcgccatcgaggagtacaaggaagtcaaagcccgctacgatgatctgtcccgtcaggtgaccgacgtggaggagagccgcaacgagctgagccgcatgatcgcaaagctttccgcccagatgcgggagatcttcaccgacagcttccgtgccatcaacgaaaacttcagccgcgtgttcaccgagctgttcggcggcggcgaagccagccttgtcctggaggacgaaagcgatgtgctggcctgcggcatcggcatccgggtagccccgccgggcaaggtcatcaagaatctggaagccctttccggcggcgagcaggcgctggtggctatcagcatctactttgccattctggcggtgaaccccgcgcccttctgtattctggacgagatcgaagccgccttggacgatgccaacgtggtgcggtttgcccagtatctgcgccgcatcagcgataagacccagttcatcgtcatcacccaccgccgcggcaccatggaggctgccaatgtgctgtatggcgtgaccatgcaggaggacggcgtgtccaagctgctcaagctggatctggaacaggttgacgcaacgctggtttcctgatataaaataaacagaaaatagataggaggaccactatggcgttcttcggatttggaaaaaaagaaaaagataaaatgaaaacgggtctggaaaagacccgcaccggcttctggggcagcatcatgaataccctgaccggcagcgtcatcgacgatgagatgtacgatgatctggaagaaaagctgatccttgccgacgtaggcggcgaggtagcggtgcatctggtggacaagctccgcgaccgtgtgcgcgacaaggggctgaaaaccggcgaacaggccgcagatgccctgcgcgacatcattgccgaggagatgaccccggaagctgagatggcgctggacggcaagcccgccgtcattctggtcatcggcgtcaacggcgtgggcaagactaccagcattgccaagctggccgattactacacccggcagggcaagcgggtcatgctggctgccggcgacaccttccgtgctgctgccagcgagcagctggaaatctgggcaagccgcgccggtgtgcccatcgtcagcgcgggcgagggcgcagaccccgccgccgtcatctttgatacggtcaagtctgctaccgcacgcggctatgatatggtcattgcggacaccgcaggccgtctgcacaacaaatcaaacctgatggcagagctttccaagatcagccgcagcgtcaaaaaggcaagcccggaagccagccttgagactctgctggtgctggatgccatcaccgggcagaacgccatcagtcaggccaaggagttctgcaaggctgcagatgccaccggcatcatcctgaccaagctggacggcaccgccaagggcggctgcgttgtggcggtcaagcagcgtctgggcctgccggtgcgctttatcggcgtgggcgagggcatcgatgacctgctgccctttaccccggagggctttgtggaagagctgctcccccgggaatggaagcactaagggggcgcggaaaatgaaaatttgtgcagccaccggcaacgccggtaagctccgcgagctgcgccgcattctggaagcgcagggacatgaggtggtcagccagaaagagctgggcatcaccatcgagccggaggagaccggcaccacctttgaggaaaacgctctcatcaaggccgagaccatctgcaaggccagcggcctgcccaccatcgccgatgactccggcctgtgtgtggatgcgctggacggcgcacccggcgtgtacagcgcccgctactgcggccaccacggcgacgatgaagccaacaacgataagcttttggctgccatgcaggcggtgcctgccgggcagcggggcgcaaagttcgtctcggcagtgtgcttcatcctgccggacggccggcacctgacctgcatgggcgagtgcccgggcagcattgcctttacgcggctgtgcggcgactacggctttggctacgacccgctgttcatccccgcagactgcggtgtgggcaaaacggacaagcgtcccaacaccgagaaccgcagctacgcccagctgaccccggacgaaaaggacgccatcagccaccgcggcaacgcgctggcagcgctggaaaagcagctgcccagctttctgagtgcagtcacggaagaaggcgttatcgcacaggtgtctggaaaagtagagatcaagctgaaatgatcgtaagtccgaagatggctcgccctctccgcctcaccttgttcggcacctctcccaaagggagaggccttggcaaaaccacaaactttatctcctcgccagaggctctccctttgggagagctggcgcgaaagcgcctgagagggcgaggtcgctgacagatacgccccatcccgtgaaaaagtaaaattgaaaaatccgaaatatcaacctcaaaataaaggagaaaaactatgctgacaagcaaacagcgcgccattctgcgcggcaaggcaaataccatggaccccgtttacatcgtgggtaagggcgagatcgacgagaccctgatccagggcgtgaaggactgtctggacgctcgggaactcatcaagctcaaggtgctggaaaacagtatgtacaacgcccgtgaggccgctaccaagctggcagaggccaccggcgcagactgcgtgcaggtcatcggctccaagttcgtgctgtatctgcagaagaaaaaggacagcgcctacgctgccctgctgaagtaagatgaagatccttctctatggcggcagctttgacccgccccataacggccacctgaataacctgcgtgcagcggcagaccgcgtgcgcccggataagatcgtggtgatgccggcaggtacttccccctttaaggaggggacaaatgcctccggtgcgctgcggctggaaatgtgccggtgctttgcggcactggcgcaggagccgggtatgccgccgctggaagtaagcggctgggaggtggcgcaggccgcagcgggcagccgcaattataccgtgctcacgctggaaatgctggcgcgggaaaaccccggcgctatactgtatcttgctattggcagcgatatgctgctcagctttgagggctggcaccgctggcaggatatcctgcgcattgcgcgggtggtggtcaccagccgggatatcggcgatgccccggcgctgcacgcaaaggcaaagcagctggacccgtcgggcggacgcatcctgtttgcccccgtgcaggcgctgcctatggccagcagccagctgcgggcccggcttgccgccggagaggaatgcgaagccgaactgccggaagcggtgcgcagcgtcatccggcgggagggactataccggaacacagaaggaagtagcagataaatggagctgaaacaggcaaaggaacttgtgcgcggccgcttgagcgataagcgctacgagcataccatcaacgtgaaaaaaatggccgtcaaactggccaagcactacggcaccgacccggagcaggccgcactggcggcgcttttgcacgatgccgccaaggaattgcccaaggacgagatgcgcgctatcatgcaggcatacccgcagtatgcgcagggcggcgaagcacgccccacgccggtatggcacggcatctgcgccgccattctggcgcgtacggagtggggcgtcacagacgaagccgtgctcagcgccatcgcctgccataccgcaggcaaggcgggcatgacccagctggacaagatcttgtatctggccgatatgaccagtgccgaacgggactggcccggggtggaaaagctgcgcaagctggaaatgaaggatttggacgcggccatgctggcggcgctcaagcagaccaacggctttgtgctgtccgagggcaagcccctagaccccgagagcaaggccgcctacgaggatatcttagcgcacagcgggcagaatgaagggtgaaaagccggatgccgattaaaaatggttccggccatccccggataaaacaattgcagattttgccgtaccatgctatactgaaggatatgacaggtctgcaggtaaaaaactctgcagagcagtgaaaagctggaggatacaaaaagcatgagccaaacgccacgccatatcaatacagacagctcactcagccgcccgggtcaggcggcgcgcgccccgcaggctgccccggagcagaacacccgcagcaccgccggggcacagcacgccccgccgccccgccgcccggcacagcccgacatgggcgggaatggtgcaccgcgccgccgcaaaaagaagaaaaagaccccgctgtggctgccctttgccattgtgatgggggtgatcgccgtgatctccggtgtggtggtgtacggtgtgagccttgtgaacaaggtggaggacagtatccgcccggcggaaagtgccccctccatcgtacaggagatccagaccgccgaggagtacaagggtgatgtggtcaacattctggtctgcggcatcgactttgaagagggacgctcttacagcgacgccagctccaacgatggcatgacggatatgattctgtactgccagttcgatatcaagggcggtgcgctgcggatgctgcagatcccccgcaacacgctggtgaccacccagaaccgcaagcttaccctctccaacggcaagacctatgccgtttccaactaccagatcaactcggtggcactttccaacggcggcagcattgccgcgctggcagatgtcatctacgaccagtaccacctgcccatcgactactatgtcaccattgatatgcaggcgctggtggaaatggtggataacttcggcggcatcgaggtgtatatcccccgggatatgtcctacggcggcagtaagctgctgaagggctaccgcaatctggacggtgcctcggcagagttctttgtgcgctgccgccacggcgacggctacgcaaactccgatatcgaccgcttgaatatgcagcgttacttctacgcaggtctgttcaagcgcgcccgcgccatgggcattaccgatatcctgaaccagctgccgctgatcttcaaggactatatccacacggatatggatatcaccaccatcgcaaagctgctggcgtccttcctcaagatcgacagctccaacatcattctggcgcagacgccggtgttcatgggcgtgcccaacgtgggcaagaccgactcctttgccggctactcctgcgtggtgccggatgccggctccatcgcaaacctgctcaaccagtatttctgcacctacaccggcccggtggaggtaagcgagctgcacatggtcaccgaccagtggccccacggcagcgcatccaccgatgccaacgtgcagtatatgggacgcatcgataaggaatccgacgacgccatcctcagcggcgataccgacctttccggcgctgtgaccaccgatggtcaggcagcgggcaccggacagtaacaacaaaaacaatgccctgcacaccgggtgcggggatgttccgacagaagggagaaacacatggataatttcaacgacagcaaggcgcttgccattgagatcgccaagattttggacaagaagaaggcacaggatgtgcgggtgctcaaggtggaaagcctgaccgtcctgaccgattatttcgtcatcgcctccggtacctccaccacacaggtggcgtctctggcagacgaggtggagtacgagctttcgcagaagggtctggaaccctacagcaccgagggtcacgacaccaagaactgggtgctgctggattactccaacgtcatcgtgcacgtctttgtgcccaacagccgcgcttactatgatctggagcacctgtgggcagacggcgagccggtggacatctcggagtacctgaccccggatagcagcattgaataattaaggcaaaaaggtttgcttctggcaggacccgctccgttattgcggcgcaatagggaaagttggcagaaaagctcccccctcgggggagctggcagggcgaatgccctgactgagagggtttgtaccggaagtaccttaaaagcatacgcccccaagcaacggtattttggttaaagtctggagctgattacaaacatgaagtatgattacaaggctgttgaagccaagtggcagaaggtgtgggaggacgaaaagaccttccatgttgagatcgaccacaaaaaacccaagttctatgcccttgtggagttcccgtatccttcgggtgcgggcctgcacgtcggccatccccgcagctacaccgcgctggacgtggtaagccgcaagcgccgtaaaaacggctacaatgtgctgtaccccatgggctgggatgccttcggtctgcccaccgagaacttcgccatgaagaaccacatccaccccgccatcgtcaccaagagcaatgtggaccatttccgcagccagctcaaggcgctgggcttctcctttgactgggatcgcgagatcaacaccaccgaccccgagtactacaagtggacccagtggatcttcctgcagctgtacaagcacggtctggcttacaagaaggaaatgaacgtcaactggtgtaccggctgcaagtgcgtgctggcaaacgaggaagttgtcaacggcgtgtgcgagcgctgcggcagcgaggtggtgcaccgcgtcaagagccagtggatgctcaagatcaccgcttatgccgataagctgatcgacggcttggacggcctggattacatcgagcgcgtggccacccagcagaagaactggatcggccgcagccacggtgcagaagtgaacttcggcaccaccgccggggacaccctgaccgtgtacaccacccgctgcgataccctgttcggtgctacctacatggtcatctccccggagcacgccctgctcaagacatggctggaaaagggcatcatcaagaacgccgatgccgtcaaggcttatcaggccgaagctgcccgcaagagcgactttgagcgcagcgagctgaacaaggaaaagaccggcgtgcagctggacggtgtgatgggcatcaacccggtcaacgagaccgagatccccatcttcatctccgactacgttctgtccacctacggcaccggtgccatcatggctgtgcccgcccacgatacccgcgactgggagtttgccaagaagtttggcctgcccatcatcgaggtggtcaagggcagcaccccgtccaatctggacgaggctgcctttaccgatgtggctaccggtacgctggtcaactccggcttcctgaacggcctgtccgtggtcgatgccaaaaagaagatgatcacttggctggaggagaacggcaagggccgcgataaggtcaactacaagctgcgcgactgggtgttcagccgtcagcgttactggggcgagcccatccccatggtgcactgcgacaagtgcggctggcagcccctgcccgagagcagcctgccgctgactttgccggacatcaccgactttgagccgggcccggacggcgaatccccgctggcacgccacaaggactgggtcaagaccacctgcccctgctgcggcggccccgctacccgcgagaccgacaccatgccccagtgggccggttcctcctggtacttcctgcgctatatggacccccactgcaaggatgctctggcctccaaggaagcgctggaatactggtctccggtggactggtacaacggcggcatggagcacaccaccctgcatctgctgtacagccgcttctggcataagttcctgtacgatatcggtgtggtgcccacggcggagccctaccagaagcgtaccgcccacggcatgatccttggcctgaacccccacagctttgtcaacctgcccgctgaggagcaggagaagctgctcaaggagtacggcagccagaaggccgccgagaaggcactggaagagaagtacggcgagatggcgcgccatcccatcgtgaagatgtccaagagccttggcaacgtcatcaaccccgacgaggtggtggatcagtacggtgccgacaccatgcgtctgtacgagatgttcatgggcgactttgagcaggctgcaccgtggcagacctctgccattgcgggctgcaaccgcttccttgaccgcgtgtgggcactgagcgacaagctggtggagggcgagggctaccgccccgccatggagaccctgatgcaccagaccatcaagaaggtcagcgcagatattgagggtctgaagatgaacaccgccattgcccagctgatgacgctggtcaacgccctgtacgacaacggcggcgccaccaaggccgagtttgagacgctggtgcagctgctgaaccccttcgctccccacatgaccgaggagctgtgggagaagctgggtcacagccacgatgagcagctggcctactatccgtggcctgcctacgaggaagccaagtgcgtggaagctgctgtggagatcgccgtgcaggtgaacggcaaggtgaaggcacgcctgaaggtgcccgcagacatcaccgccgaggacgccattgccgccgccaaggcagaccccgctgtggctgccgcgctggaaggcaagcagctggtcaaggaaatctacgtcaagggccgtctggtcaatctggctgccaagggctgagaactgctgctccgctgaataagcgcgaacatatcatcacccgcagaggcggatttagcgcaggaaacacccgggagcgtctgttcaaaaatctttcaaaagttttgagcaaaaactttcaaaaaaaggttgacgaaccggataaaatgcgctatactgtctactgttagttaccatgtaacaacgaaattcctgcctcacggtccaagggagggaataagatgtcggaaattcgtgttaaagagggcgagtcgctggaaagcgcactgcgtcgcttcaagcgcagcactgctcgcagcggtgtgctcgcagaggttcgtaagcgcgaggcttacgagaagccgtctgttaagcgcaagaagaagtccgaagcagcccgcaagcgcaagttcaagtaattgattgcttggaaccgcacgttgctttagattttaaacgcgttgctaacgccgatgtaggggagcctgttatacaggttcccctattttcattttaaagccgctttgcgcagggcagactgagagggtctatttatgctcattacccccgaatatgtttttaaggacgttacccatatcacgccggaatggctggctgccaagggcatcacggctctggtgctggatattgacaacaccctgaccgcagaccgcagtcaggagctgccggaggaggttgccgcgtggcttgccgccatgcgcaaggccggggtaaagctgaccatcgtctccaacggtgcggaaaagcgggtgcgcccctttgcggaaaagctggggcttgcttacctgtaccgcgccgccaagcccctgccttttgcgctgatggtagcacagcaccgcatgggcgtgaaacaccgccagatggccatggtgggcgaccagctttacgccgaccgcatggtggcggcgctgtacggcattcccgggctgatggtcatcccccgcgggccggacttgggtgcccaggtcatcctgaaacgcaagtgggaaaagaagcactggaaaaagtactacgaccggggaggtaagaccctgtgagtgaagcttggaacatccggttcggcaccgcaggcaccagtgacagctttgccgcccaaggctacaaaagcagtctggacgtgccggagtacaccgccaaaatggggctgaacgcctttgagtaccagtgcgggcgcggggtgcgtctggggctggataaggccgcccgcatggctgcccttgccgcccagcgggacatcctgttcagcgtccatgcaccttattatatcagcatgtccagtctggaagaggacaagcggctgaacagcatccagtacctgctgcaaagtgcggcggtgtgccgggcactgggcggcagacgcatcatcttccactccggcagctgcggcaaacagagccgggaggcggcgctggagaaggcactggataccatgcgccgcgctgtggctgcgctggacgaggcgggctttgaggatatgaccctgtgcccggagaccatgggcaaggtaggacagctgggcacgctggacgaggtgctggcgctgtgcggcgtggacagccgcattactccctgcatcgacttcggccacctgaacgcccgcacgttgggcggcatccagaccaaggcggattatgccgccattctggaccgcatggccgaggtgctgggcgatgaccgtgcccggcagttccatgtgcacttttcccgcatcgagtactcggcgggcggcgaaaagcgccactggacctttgccgatacgcagttcggcccggagccccagcccctgatggagctgctggcagagcgtcagctgaccccggtggtcatctgtgagagcgcgggcacacaggccgaggacgcgcagacgatgcagcaaatgtaccgcgcagcgcggaatgtgtaaaagattttgtgtttttatcgtcttttttgcccaaaccccttgccaaacagggacagattgggtaaaataaatagagatatgcgttaagcatctgagattaaatttatggaggaattcctatgatttctgcaggcgagtttcgcaatggcgtgacctttgagcaggacggccaggttcttcaggtcgttgagttccagcacgtcaagcccggcaagggcgctgcctttgtccgtaccaagaccaagaacgtcatcaccggctctgtggtcgagaccagctacaaccccaccgcaaagttcccgcaggctttcatcgagcgtaaggacgtgacctacagctacgaggacggcgatctgtaccacttcatggacaacgagacctacgatgacatccccgtcaacgcagccgacgtgcccgataacttcaagttctgcaaggagaacgagctgtgcaagctgctgagctacaagggcaaggtgttcagcgtcgagatccccaacttcatcgagctggaagtcacccagaccgagccgggtgtcaagggcaacactgctaccaacaccctgaagcccgctaccgttgagaccggtgccgagatccgtgtgcctctgttcatcaacgagggcgatcacatccgcatcgatacccgcaccggcgagtatatggagcgcgtctgatcatttgtcgcataccgggcagcgggcaaccgcttgcccggtttttgtatcatacacaaggagggcatttcagatggaactgaacaagaaagcagcctacctgcagggcctggtggacggtctgggcgtggatgagagcaccaaagagggcaagatcatcaaggccatggccgcactgctgggcgagatggccgatgccattgccgctatggacgaggatctgacccaagcctacgaccagatcaacgatctgagcgaggagctggaggatctggaagccgacctgtacgaggacgaggatgccgaggacgaggacgacgacgcagccgacgaggatgaggatgcgggagatgacgacatcgccagcgagcccttctacgaggtagcctgccccgcctgcggcgagaccgtctacgtcagcgaggatgatctggatgcaggcgaagccaactgcgcccactgcggcgtgacctttgaggtcgcactggaaggcgacgaggacgaagccaaggacgcccccgtgcagtacgaggtgacctgccccgcctgcggaaagaccgccgtatttgaggaggatgagctgctggacggcgcacccaagtgccccaactgcggtgagccgctggactttgaggtgactgaggagtaaacgcttcttcatcgcccgtgaaaaggcaattttggaaaatccgcagattttccaaaattgcaatctaaaaaagaaattcctatgaatatggccaaagcgcacgcgaaggccattccaaatcgtccctgtaaaaacgcaatgccgggcagtccgcagactgtccggcattgttcattttaaattgattcagcggttctcgttggccttctgcagccagatgccgccgatgtccagcgcgttgtacaggccgtgcttggtggtctgacgcgctacgcgctcctgcggtgccttggtggtatccgtagaaagcagcatcaggtgtaccttgtcggctacctgctgctcgcccaccggggtggtggtcaaaatctgcagatacaacacataggggtcggtcatgctgccgtaatacagctcgttgtccttgcggacgaggggcttgcctttataagtcaatttcggtgtatatgccatcgtgaaagcctccctatcgtttgattcatcttagtatagcacatcctgcctattggatgcaagcgtttgcggcagagcactgtctgttttgcaccaaaacagccccgtaccgtgcaaaaccgacagcacatttttggcaaatggggtttgctgttgggtgcagttatgctatactataaatagaacagcccgcattccgggccggaagtgagggaacgacaatggcagattatcaggaataccggcggcgcatcctgcaccggcgctggcgcagggtgtttatcatcgttgcccttctggcgctggtggcgctgctgagcgccattggtatcctgtggaaggtgctgcaccgggagcgcgtggacaccgccctgagccagaacaccattctgcggcaggtgaccacggacaatacatggaacacgatcagctatccgttggcgcggcagctccgggtacagacactggagggcagcaccgagaccgcgctggacttccgcatggcggcgctgccggccagtgccccggtggaaaaaagctggtttgcacaggccagctttgtgggcgacagcctgacgcagggcttgcagatctacgatactggtctgcccggggcgcagttctgcgcctataagggggtaggccccaacgcctttgtcaatggcaccagctgcaagcgggcggacggcgtgacagagatcccgctggacgcgctgaccgcgcagcagcccaaggccgtctatgtgctgctgggcagcaatgtgctggggcaggacaccgactacaccagctttctgacctactaccgtttgatgctggatatgatcagtcaggcgctgccggatacaaagatctatgtgcagtccatcacgccggtacggccggaggtgagcgcacaggcaaaccacgcagggctgaaccgcgaccgtctgtgccacatcaacaacgagttggccgccattgcactggaaaagaactgctatttcctcaacctgtgggaagtactggcggatgaaaacggcgacctgatcgaaagctacgcccagccggacggctaccatatcaagccggagggctacgctgtatgggtggactacctttgcagccacaccatggagtgaaaatacaaaaggcgctgtccgcgaggacagcgccttttgtgctttatcgggcttttttatcagaacaggccggtgatcttgccgtcggcgtccacatcgatgttcacggcggcgggctttttgggcaggccgggcatggtcatgatgttgccgcagatcaccaccacgaagcctgcaccggctgccagacgcacctcgcgcacctccatggtaaagccggtgggtgcaccggtcagcttggcgttgtcgctgaagctgtactgggtcttggcgatgcagacgggcaggttgccgtagcccatctcggtcagttcggccagcgtcttgctggcggcggtgctgtaattcacgccgtcggcgcggtagatcttggtggcaatggcgttgatcttgtccttcaggggcatctccagcgggtaggtgtactggatgggacgatcctccaggatctccagcaccttctcagccagtgccttgccgccctcgccgcccttggcgaacacctcgctcagcacgcagggcacgccctgctcggcgcagacctgctccacataagcctgctcctcggcggtgtcggtggggaaggcgttgatggcgaccaccaccggcaggccgaagccgttcttcaggttgtcgatgtggcggatcaggttggaagcaccggccttgacggcctcgaggttgggccggttcaggtcggccttggctacgccgccgtggctcttgagggcgcgcacggtagccaccagcacacaggcagagggggcaataccggcatagcggcacttgatatccaagaacttttccgcgcccagatcagcgccgaagccggcctcggtaatggtgtagtctgccagcgagaggctgagcttggtggccagcacgctgttgcagccgtgggcaatgttggcaaaggggccgccgtggatgatggcggggttgttttccaatgtctgcacaagattcgggtccagtgcatccttcagcagggcggtcatggcaccggctgcgccgatctcaccggcagtcaccggcttgccgtcgtaggtataggcgcacacgatgcgggacagccgctccttcaaatcggagatgctggtggcaaggcagaaaatagccatgacctcgctggccacggtgatgtcaaagccgtcctcgcggggagtgccgttcaccttgccgcccagaccgtccacgatgaaccgcagctgccggtcgttcatgtccatgcagcgcttccaggtgatgcggcgggggtcgatattcagcgggttgccctgctggatgctgttgtcgatcatggcagccagcaggttgttggcggtgccaatggcgtgcaggtcaccggtaaagtgcaggttgatatcctccatgggcaccacctgtgcgtagccgccgccggcagcgccgccctttacgccgaacacggggccaaggctgggctcgcgcaggcagagcatggtctttttgcccagcgcgttcatggcgtcggccagacctacgctggtagtagttttaccctcaccggcaggggtggggctgatggcggtgacaaggatcagcttgccctgctttttggcgttgtggatcagccggtggtcgatcttggccttatagcggccataggggatcacactttcctcctccagacccagctgagctgcgatctgggtaataggcttcattttggcttcctgcgcgatctcgatatcggtcttcatacagacatcctccttgatagcaaaaaaggacagctttgcgcagcaattgcgcaaggctgcccagacggtcggcattgacatccccagcacccctgcactgtggtgctccacaaggttccgtcagcagggatgcggtctatgctgtaaagatagcacaccaccggggtgtttgtcaaggaggtacagttacaaaaatcacccataaatgcataaaattttttgcgttatccaagggtttgtgctatacttattctgggttattatgaaaacaacgacagaaagcaggaaatccatatatgctgcaaaaccctcagttacattatctggacaacgcggccaccaccatcgtagcgccggaggtggcggacgtcataaacaaggccatgcgggagcattgggcaaatccttccagcctgtatggcccgggcgcgcgcagtgaagaagccctgaacgccgcccgcgccgccgtagcgcgcacgctgggctgcaaaagccgggagctgtattttacctcctgcggcagtgagagcaacaatctggcgctgctgggtgcggtgcagacccgcaccttcggcaagggcatcgtggtgtccggcttcgagcaccccagtgtgcagcgcccgctggagcggctggcaaagcagggctatgatgttaccgtggtagccccccgggcagacggcacgctggacattgccgccatgctggagcgggtggacaaaaacaccatccttgtagtctgcatgatggtgaacaacgagatcggcacccgcaacgatgtggagcgccttgccgccgaggtgaagcgccgcaacagccgcaccatcgtccatgtggacgcggtgcaggcgtggatgcgtgtgcccatcaagttggacaacatcgatacgctctcggtgagcggccacaagatccatgcccccaagggcattggtgcgctttacctttccgaccggctggtgcaggccttccagccgccctatctgggcggcgagcaggagcggcagatgcgccccggcaccgaaaacctgccctatgctatgggtctggccgcagcggccacccgtctggcaaagactatgaagagccgggacaccgccatgcgtgcgctgaaccggcagctgcgggaggggctgaaagccttcccggaggtggtcatcaacagcccggagaacgctgtgcccgaggtgctgaacttcagcgagatgtgcatcaagagcgagacgatgctggcttttctggccgaggagcagatctacgtttcctcggccagtgcctgcgggcgcggtcagcccagccacacgctggcagccatggggcgcgacccgcttgccatcgacactgccatccgggtgtccttctgtgccgataacaccccggaggatgtggatgctttcctcaaccgcttcgaggacggcatgaagcacttgcagaagatcagaaagtaaaaacagaagccgcagaacggctgacagtttctctgaggaccgtccgctggggtgggaccctgttgcccgcagggcaatagggcgggcgatggaatggcccgattcgtgtccgaagagaaagctgtcagccgttctatgggaagatgcagtttgcctgcgcgaccctaatgcgtgaaagggtgaatggaaaatgaccgcagtcattttccattcatagagtaaaacaatttttccgctgaatatggccagagcgaaagcggaggccattataaatcccacatcaggagatgcaacatttatgaaggaaattattatgggctatcagggcgaaatgtccctgaaaggcctcaatcgcaaccagttcgaagcagccatgatgaagattctgcgctaccgtcttaagacggtgggcaagttcaaggtgtactgcacccagtccactttttatatggaacctgaggaagaggacgtggatatggatcttgcctttgagcgggtcagcaaggtgttcggccttgccgcgctcagccgcgccgtggtgtgcgaaaaggatttcgataccatctgccagaccgccgaggactatctgggcagcgcgctgcacggcatccgtaccttcaaggtggaagcccgccgcgccgacaagacctaccccatgaccagcccggagctgatgcgggagctgggcgcttatctgctgggcaagcacaactacctgaaggtggatgtgcataacccgcagttcaaggtcattgtggagattcgagattacggtgcgtatattcacggcccaaaaataccgggtgagggcggtctgcccgtgggcaccagcggccgtgccctgaatatgctctctggcggcatcgacagcccggtggcagcttatcgcatggcaaagcgcggtctggcactggatcacatccatttcgcgtcccctccgtatacttctgagcgtgcaaaactaaaagtaaaggctctggcacagctcatcaccgtgtataccggcagcgccaacctgtttgtagtgccctacacaaaaccccaggaatacattcgggataatgctccggatgtgctgttcacggtgctgatgcgccgcagcatgatgcgcattgcaaacgtgattgccaaaaagcagggctgtgaagcgctggtcaccggcgaaagtctggcacaggtggcaagccagaccgtcaaggcgctgcagtgcaccgatgctgcacaggacctgcccatcctgcgcccgctcatcggtatggacaagaccgagatcattgagacctcccgccatatcaatacctttgagaccagcattctgccctatgaggactgctgcaccatcttcaccccgccgcacccgaagatccgccccgagctggaggaaatccttgccgccgaagccgccatgcccggccttgccgcgctggaagccgaagccgcagagcagaccgagcgcatccgggtgcgcatcaccgatcaggtagaattcgagggttgatttgtccatgacagcagagatcatcagtgtgggtaccgagctgctgctcggcaacattcttaacaccaatgcccagtacctcagccgggagctggctgcgctgggcatcaccgtccggcggcagagcaccatcggcgataaccatggccgtctggcggattttgtcaacgaggcaaagcagcggtgcgacctgctggtgttcaccggcgggctgggccccacggcagacgacctgaccaaggagacagtggccgcctgctttggcgacacccttacctttgacccggaggagtggcagaagatcgtggacttctttacccgcaccgggcgcgagaccacccccaacaaccgcaagcaggccatggtgccggtgcacgggcataaggtggtcaaccaccacggcaccgcgccgggcgcatggttcgagcaggatggccgctgtgccgtgctgatgcccggcgtgccccatgagatgaaggccatgtgggaggaaagcgtgcgcccgctgctgctggcgcggcagagctacgccctgcacagcctgacgctgcgggtgctgggcggcgagagcaatctggagtaccgggtgcgtgcgctgctggaaaacccaaaccccaccgccgccatctactgcaagaccggcgagtgcgagatccgcatcaccgcccgggcgcagaacgacgccgaggcgcagagcatgtgccgcgcctacgccaaaaagttctatgatctgctgggcgatgcggtgtatgatgaggatgtcgccgggttggaagagacggtggtgcacacgctgcaggccaacggcctgaccattgccaccgccgaaagctgcaccggcggcatgatcgcccagcgcctgaccagtgtgtccggcgcaagcgaggtgttcggctacggctttgtgacctactgggagcaggccaaggcgaagcttgtcggggtggacccggcggtcattgcgcaatataatgtggtgtcggctcccgtggcggcgcagatggcgctgggcgcggcaaaagccgccggtgcggatatcgcagtcagcgttaccggtctggcaggccccggaggcggcgatgccgtccggcctgtgggcacggtgtatctgggcgctgcccggggagacagggtgtatgtgaagaagctgttcgtctcccgcccggaccgtgcgctcatccgcgcccgcgccgcacagactgcgctggaaatggcgctgcggctggcacagggcaaggcccctgccggtacgcaggtgctgcccgaaagcgcacagcatgaccccgctgctctgactgccttggacgagaccctgcgggcagagtaagggcggcccctgcggccgcagggggggatgcatcatgacaaataaggaagagcgcccggcaggctgcgtgctgcggctgttcggtgcaccggagcagaccgtgcaaaaggctgtggaagccctgccggacacttggcagggcacggtgcactgccgcagccggggtgcggaaacactggtggcgctgcaaagcagcaccccgcagcagctgcaccgggcggtacagcagttgcggacaagccttgccccggcactgtacggggaaggggagcagacccttgccgctgccgcagtgcaggcgctggaacagcaccgcaagctgctggtgtgcagtgataccgccgcaggggcgctgctggagacccggctggaaaaccttcccggcgcggaaaaggtattcgattttggcgccatgagctacgccaataccgcgctcaccgcccggctcagccgcaagctgcgcaaggcaccgcaggcagagcctgcccgcacactggcgcgggtgcaggtcatgcagaagctgaccggtgccgcgctgacggtgggctgtgtggaactgccccaaagccgtctgctgctggtgggcggtaaaaagggctgctggctgcggtgccttgcgtcggacgagaaccccgggctatggctgctggatatgctgcgccgtgccgcctgtggtctgccgcaggctgggggcacaaactggcagccctatggcagagccgtgccggatgcagccctgacccctgcctccctcacggcggaacagtctgcatcgccgcgcccgaagcgccgcaggctgggcaaggcactggtggtgcttttgctgctggcactggcagcactggctgcgggctggtattataccggcggcgaccttgccgccctgccccaaaagctgcaaagccttggcgcagaaagcctgccccacgccggggcaaagctggtgtgagcgctgcgttggcgctttcactttcaatagagaaaaaaccaagcccggagggttcgtaaaccttccgggcttggtttttgcactggcgtccccgatgtgattcgaacacacggccttccgcttaggagtaggggctgaagccataaatcctaggcaaaagtaggtaaaacaagtaacgttttatcaattgattttttgttgcgctgtcaatctgagtaaagaacacaaaccccgaaataaaacgagtaaaaggcttttcattagcagaaaattagcagagctaatgaaaagtggaaggttcattgtaaaatgcccacctttcattagctgggaagtgtacgtttccctacggatatttgcttgtttagcattcgtgaaccagaccatacagccgtagctggtgtgatggacaaatgttttcaatagaaaaagaccagagctttctgcgagaaaactctggtctatgtaacagtgcgaatggaaatgcgcattgtcttgtaaaaggaaggggcttatggtattcttacgggagtaaaggcactggatgcaaggaactttgcgtgattttaggagtgtgcgatggaaaagaaatttaatattgtagtcggtgaagatggaactgtaaaactcccagaggcggttctggaaaaacttgaagtcaaacccggagaggaagttcgcttcgaggtagatgacaatttctatgcagtcaggcttctatcgcggatagaagctgaacgcttggattacttgaattggatgcataataaacattgcccctctattgaggaaatgattgcagagtcgagaaaacaagccactcagaacattgtgatctcccgtatccttgatgggatgccggcagaaaaaatcgcagaaggctatgaagtttcactcgattatgtaaaacagcttacacatcagctgaagatggacatagaggaagctaagacgaaaaaacacaaagaaacgggatcatcctaaaacagatagcggcagttttccatatacggaaaactgccgctgtttatgtatagaggcttataggttctttgcaagatttttaatgagtgtagccatagaggggtcagccagcagtttagcaagagctgctaccgcatctgtatcgactgggctggctttgggagtggattgctctgcgcgagggagggcttcaggctctgcaccatgatgctgatagaagaaatcgtcgaatcgttgtgcgttcaaacgccgatcatcatccagaatgtgtgcgtactgctcggtgaccatcgaagcctgtgcatgaccggaatcgccctgcacggctttgatatcgccgccgttcagcttgagcttgtatgtaatgctggagtgtcggaagctgtggaaaaccactttggggagatcgttttcctcaatcagctgcttcaatgcaccgttaatggtggattgttcggtcggcattcccagcgggccggcaaccacgagattatagtctgcatactctgcacccagtgcgtcctttgtcatgtcctgctcggctttatagtggacaagcatttcagcaactgttttggggagaaaaatggttcggatactgctgtctgttttagggcttttcagaacctggaccgtggtgcagcgggaactcagcgagggaaaacgagtgatgacatttttattttccaaggcgttcagcgaagcaatatctacacgctgcaattccttatttatgtaaatggaggctcgcccggcttcaatgctttcgggggagatatccacacaatcccatgtcagaccgagcaattcccctaagcgcagggaacaagagaaggagaggttgatgcaaagccggagccgtggatcatcacagacttctaaggcatggaacagggtctcggcagtccagatatcacgcttctttgcagtgtatttgggcaaggtggcataaatacagggattcttttccataagttcccactttacagcctgctcaaaggcacttctcaaaattttgtgaaccgaacgaaccgtgccgggagaaacgtattgatgctgacgctttccacacatagggtcaacggcttcgtatttaagcagccgctgataatatccctcaattacgcgggtggtgagatcttgcagcttcattgagccgataagcggttctatgtagtttgaaatcagtgcagtgtttgattgataggttgaaagtgcccatttggttcttccgtacagggtgacgtattctttaagcaggtcttttagagttcggcactggggtgccacaaaggtaccgacggattctttgtattcgacctctttcttacggtttttggcatctgcaaggtcggtaaaggtttcccatttctgctttagcgttccattagtgtgtttgtaggtatagacaacgcagtatcggttattgcgtttgacaatgctagccattatacatcctcctctactttacgtttggacttcagaacttcatcgaaagcatctttttggatgcgttttacccttcccaacttcatcgttggaattccttctttgagaacccacgagtcaagtgttgggcggctgattccgtaaaaagcctgaatttcctgaaaactgtagtatttcccattcttgggacattgcagttttagcggcggctcctcatgcgtttcttttttcggtttttgaagttggtatgtagattggcttttaagccatgccttaaaactttttttggtaatgcgcggcctgtcggccatgcgctcaatgacgaaacaatctcggtattttttgcaatcaagaatcccataaacattcttgcgtgggataccgagtagttttgccatttccgggatggagatggtttgcgcttcaatctcccggtcacgctcccggtcagctgctgtgcggtagcggctttgtgaccggtaccaccgctcaaattcctctttgggaatcctcatacagaagtctgtcgtttctgttttcaacttgccctgtcggatgagtgtatagatcgtttcgggtttcaccttcaatatctcggcggcatcaggaacggaataggatcgtttgcaaagttcctcgcccggtggtgggccattgaccttatgatatttgacctgattggtataccatttctcaaagctggaaataacgatacgccttttttcgtttatcagaatgacttcaaagagattcttatgaagcagccaatagctgtctgttttgccaaggccgagaagctgccgcatctcacgaaccgacatggtggttttggtagtggcaggttcagcttttccgtataagggagccgaagtattccgcatatcatccatgaaagacacctctctatctatgtaaaagtttagccgggatttctcatcccggctaaagaatagcagatttcgcttgaaatgttgaggatgtcaaacagcaggattgcgttcaacagtgccatcattgagccatgcttcaaagctggctttggaaatacggtaagcgccgcttaccttgaaccagcggaattcgttctgcttcagtagacggtagacagtgggacggctcaggagcagcatttccatcaggtcttctacggtatagcagcggctgtcctttgctgtggaaacaggggaggaaactgagttgggcgaagggtcttcatggataatcattggataatacctcgttaaatatacttaaagttaaaacttgagcggtaatgcagcccggcggctgccaccattataaatagtatagacctgctgaaggtacttcgtcttgccgggaaggcttacgcctgcggttcgtgcaaggcgaaaaatcgtgaatgcatcgacctgccgcagtttggcaatcagacggcctttgttgtattcggagtgatacagttctacaaagcggcaaatgccgagcaggtttgcggaactcatggaatcgggttctccgttccacgcattcagcaaaacatcaagggattcgatatacagttccggacccagccggatgaattcatgataggcggttgcaatgcagctgatccgctgcttgcctcggccttcttcaaaagaaagatgaacgccagccaattcggtggcctgctggaatgcaacggcagcaggctcccctgcaaaaatcagggcacggagcttctgtcctgcactcagccgttccgaaatgcctgtctgctgtgcaaacaggagggcttcttctcgttctgtcataccaaaataaaccttgcagcgaatctgcaaatcttcgccgccgttcagaaatttccgtgcagcgatggtgttctgtccgtccatcacatagtagtgaccatcccggaagctgatcttcggctcattggcaacccgctcgtcaaattcttttgcgatgcgggcaacacgagcggggtgaagagcacgctgataagtgtcgcgcggcacgatcagttcgctgctgttcaggcacatttcatggtaaggttttacaactgcgttcatcataaaggaacctccttcttcttttgcagaaaatcaattcctgattggataatcaaaccgattttcttcttttcgttatcggataagtgaaaactggaataccgttcataacagatattccagcggaacataagcgattgaagtgcatcatccagttctgcaaccatgaactcaacagaagattctgccggggtggagagcatcctttccgatatctgctcaatgctatgtaaatcgccttttgtgtgcttggcgagagcagggggctgactgttcagcacacgaagattttgaaactgctgggagagcagctcttttgcagcggcgagaacatcctcctgcggaggagccgtaaggtattttcggaatgacttatacccaatgaagccaaagctgtattgcagacacactgacacttgccgcatttcatatttggacaggtgcccaaggtagcttaacactctggatttatctgcggggcgcgggctttcgcaaatcgccatagatggcgcactcaaaaaacgattgtgcagaataaaatgcgttggcatatttcgctttttgatttgtgttgtcagcggaacgaccagaagaacattggaataaaaattaccgtcatcgttctggacaacaatggcaggtcggatgccgccttgctcggaaccgctgtaaggattcagatccatcatgtagacatccccgcgcttgtacatccagtttgcgggcataggcggatactttttctcttttttgcctcgtgttgccaatttggatttctcctttctatccgtatatgtaacagtgggctgctcgcacagcccaccctactatctcaaacagcaaaaatgctgtgatttatagttctatacctttccgtatttgtccccgacatccccggaaaacgaaaactcagttttcgtgtgggaaatctttcagccgtccggcagcgtaccgaatccatagggttctcacctctccgtggttctcaccgagctgcccgaaggcagaagtatcattattctgtgatggctcttagctatggagaagctgtcatccatttaccgtcaacctaccgctcattccctcagtgggagatcatcgcatttgttacggacgtggctcatcatcacaggaacgtgactgaagaatgcgtgttcaattttcaaggggcgggatagcttgagggctgctttgaacgctttccgaagctatggctgtattgtaaccgatgcggaacgaaatgaacaggaactcagagttcacaatttttgaggaaaataggaagtatcgttcctgtttctcgatgaaccgtcaaaaatatatttcctgactttatgtaagaaatgaagtattatactcgtaagaaactaacttacgagtatataaattcgataaatacactttggggagggaacaaactaccactactacattttctcgaaaggcggatttacggacggactacttcaggcacaggaacgcggagaagtacagctgcttgcccttgccgatatttttgaataacacaagaaacgctcttgccggtgtaaaactggcaggagcgtttcttgttgaagtgattataaaagacctttgattttttcaagatgatctatagcggcttgcagttcattttgaaactgatccctagaaggatctcggcccaaaagaagataatccatactgacatggaagtattctgcaatatcgatcaggatttttacagagccattggagcttcccctttcaagatcgccgaggtgtcgatgggaaacaccaagtttttcagcaagtttttcctgcgataacttcgcatttgtacgcaaagtaaaaatacggttaccaatagcattcggatcaaaactcatgtgtgacctccaaattttcgataaagcgtgagaagtcgaaaactcggagttgctacggatatctagccgcttggggcatccacgaaaaacggacaaacataaagcctgctcctttttacgggagcaggcttcctgaaggctaaaaaaatagccggacaacaaccaactgagggatcttcaaagaaaatctctcaatcagctgttgcccggctatttggagcacgtttcatacattgccttgcggcaatggcccgttgctcggagcgaacagtccatattcagggtgcaatgcacccgtatttgttaaaatgactggaaaatcaccggcatctaaatgccagatcaagtctcagggtttctttgcatctattgcacttcacttgtagtatacctgaacacccctcgattttttggtataacttatttccacaaacagggcaaaatctccagcctatgctaaattctgcctgctgtgtagtagtcggtgctttaccggcaaagggacggttctttaactgaatcatattcattctccaaatcgcatgatgtccaatggatggcagtggatgggttttccttttataacctgcatctgctgcagtctgatcctgattgcagaccaagaaaccccaatccgtcgagccatctccagaaatttttcatagttagggtcagacactgatttgtacagaatcccatttggcagagtcaacgccacacgttctatttcggcattgatcagaaatgttggcatcagcagctctgctgcaagggtatccgcctgccattcttcccacgaggcctttccgtttctctcccgataggcaatgtgcccacggcacttgactgcttttccgtagtcgttcggaaacagatcagccaaaatctgatgtgctgcttcatgcgttattgtgaaattccggcatccagtgcatctgtctgccgcaagagcagaatcgattacgatatccctcggcataaatacttcaacaagctttgttccatcctcaagggttgctgtgaagctacatctctggaaaaccgttaatccaaggatgtgaccatcgctacacagcggcaacatctttaggttcagtccaagaacagaatttgcaaactgctctgggttaataggagcggggtcatttttgcttattccgaagagtgcatagtacatttcaatatatttgcctgctatgcacgagagttctgcacgcgataagtatcttgccattatgaagccctaccttctgatgtggcacagtaggcttccacgaaccacttgcccttttcaagccaaagattccgcttctgcccgcaaatcaggcaggtgaagcaatgccctttcacgccaaaacgtgatgtaccgtgcttgactgccaagacacgatcaattccataagtgcgagtcttgtcatagtttatggcaagaggacggatcttgccgtcaggagtaaaacgaacatccactccgacgtatcttttctcacggcgaaggttgtaatcaccacacatcagaaatcctccttttttgcagatctatcagaacaccgcgtgcattacttgcgaatcatactgcgtgccacgagctgcttttcgctcaacaccggaacggacactgtatgttttttccactcttccatagagcaggtcactgctttgcacagacggcattttgtccagccaccggtttcatcaagatccacatcgtagttcatagttccacacatcgggcatcttacattttcttttctcatagtatcgcctctcaaaaacaccgaataaacacatttcctgtcccaaattaacaccaaaaggctgttattcgtggatttgattcgattatacacccactttttggagatgtcaattacgcatttgtcgctattttagagatttcttattgatttcctgtattttctatactataatagggctatcggatcacaaaggagtgttcttgttatgaaaaagaaaaccacgctcacaaaaatgcacatagccccatccacagtgcgctatgatgcagtcgctgcgagggatagcaatgaggttggtcagattctcgcaggcacacgaaaaaggaatggctattcacttgtagctttctctgaacttctccgtcactatggcgtcgatgtcagtgataaaggaatcagcaaatgggaaaaaggctataccactcccagcatctatcaactagttgcaatctgctacgcattgaacatcaaggagggtccctcctactttacaaagaactttcagaaacccgcccttctaaatgacatcgggcaaaaaaaagtcgctgagtacgaaatggacttgattgcatcccggcgctaccagccagacacagaagagcctgcggaaatcgactgcataatgatgcctgtgtcagagctgccagtatcggcaggtctaggagcttttcttgagggtgaaatgttccagcagatacaagtgcctgccagtagtgttccggctggtgccgagttcgggatatacgttagcggtgatagtatggaaccacgttatcatagcggacaaatcgtatgggtaaagcgctgcgaagaacttgaatgcggagatatcgggatattcgtatatgatgactgcggatatctgaaaaaatacgatgaacataccccagacaagtcccaagcagagctccttaccgacagctatggcgtggtgcataaccaaccggttttggtttctcttaacaccaaatattcgccaatccttatatctccagagcaaagatttgagatcgttggaaaagttttgaactaaaaagatgggagggattttcgtggatacgatcaaacgtgttcaggatttgatgcaagagcgtgatatgaatctgtgtgtgttgacaaaaaaatgcgggatatcgtactccacaatccaaagtactgcccgtcgaggagggcagttaagcgtagagacgattgaaagaatttgtcagtgtttgggaattacattaaaagacttcttcgattcttcatatttgtaaatatggcagaaaaaagccgttcaccgagctagaaaacctgtgcggtgaacggctttaatattgcttctatttattcccaatagcattcacgcatcaagatgtagcagtcattttatatgtggttctgacaacaaaaagaagtggaagtattcctatgttggaatgctcccactctttagggatcacaattcttgagttctcagtgcattttcaagcatttgacgataatcttcacaaaccttttggggtgtgccataataactcgtgatgaattcagttgccttaaattcatacgagcagtgacacgaccaactggattcagaggatgaatacatacaggcggttctagtatgaacaaattgatttcctgccactataacatggacactaaccgggtggaagcccggttcgaggatggcactacccttgccatcgactgcatcgccgtggaggacgaatacggcaacaccccggcacagcgggcagaactagactggctgctgtacaataaaccgctggagtacgcacagatggtgctgagaggggagattgagcattatctctcgcttggttgcgaccatggaagattggaagattgattgacaaggttacataacagttaacacagcttgcatttgccctgcaatttttcagaatggaacgccccaagggcatccggtctatatccggcagatttttcataaagaatctgccgggtatttttgtttgtcatacctattgcaattctgactatttggaatatacttgtaagtatcaaattatttcactgtatgaggacatccgcaccaaacttatccagtccggtgtaatgaaatgcagagaataaaagacaaaattggtatgttccacgaaatttagggagaaaactgagcaagtaggaaggcggaatatatatgaaacaagatactttagagggcaaagcaaaaacaaaaaatggggtaaaacggctgtgtttttccataatctgcattcttctggaagtgttttttattattactatcgtaacacgcttgaatgaatatgcagaagtcataaatttatttacaaggattttgagtgggatcttggttttgggattgtacgcatcaaataagacatcctctatgaaaatgccttgggtcatcttaattctaattttcccaattatgggtgtaggcctgtatttgttgattggtttgaatggtggcacacataaaatgcgtgagcggtatgcagaaattgatagcaaattgttaccaatgcttccggacagtcaggagtgtttgagcagaataaaagaaacaattccgaaagcaggaaatatagcaagttacatacaaagaaattcgcagtatccaatctatcagaatacggatattgtgtattttgatgaagcagtgaaaggattagaggcacagcttaaggatttggagaaagcacaaaagtttatctttatggaatatcatgcgatagaagacgctgaagcatggcataagattcaagatgttctggaagagcgagtaaaagcaggtgtggaagttagagtattctacgatgatatgggttctataggctttattaacacagattttgtgaaaaaaatggagacaataggaattcattgccgtgtattcaatccgtttatgccaggtttaaatctgtttttgaacaatcgtgatcatagaaaaataacagttattgatggaaaagtcggatttacaggtggatataatctagcaaacgaatattttaattacacacacccgtatggacagtggaaagatacaggtattcgtttagaaggagatgctgttcagtcgcttacagtgacatttttagaaatgtggaatgctgttagtgaaaaagctacgaatgatactgattttagtaaatacattattcattacgattataaagcacagcaaacaggttttgttcagccttatgcagacagtcctatggataatgagcaggtcggagaagaagtttatatcagtatgataaataaagctgaaaaatattgttggtttatgactccatatctaatcataacagatgaaatgacgcatgcgttatgtctggctgctaagcgaggggtagacgtaagaattatcacacctggtatccctgataaaaaattcatttatagtgtaactcgttctttttatcatggattagttaaacatggtgttcgtgtttatgagtggactcctggtttctgtcatgcaaaaatgagtgtggcagatgactgtatggcaacttgtggaacaattaatttggattatcgaagtttatatcaccattttgaaaacggctgttttatggcagattgtcaggcagttgtggaaataaaaaatgatctgataagaacgatgggagaatgtcgtgatgtgacagaccaatatcaaaccggacgaagtgcatatttgcgactgggacaattatttatgagattatttgctggattgctataagaatctgatgatacgacctttcaaaaaacagttgatttagaaggtaactgtttttgaaaggccgtttttgctatatctaacagtctgttgtacaaagaagattttgcatggatgaaaaaacaaaccttgttgaggttaaattgagttttctattgtattgtattgctaatgaataagaataagaaataaaaaggaatcaagtgatgtacaatgaaaaagcataaaatatgtaaaatccttcttgttatactggcaatttttttatgtgtggctttttatgaattgctcggaatctgcgttgcatataaaaagcagccggaagtgtccaatacaaccaaaaaagaaacaaaaaatgggtcatggaacgaatgcagtgaaaatacagaacgggcagtaatcatagaaaagaatccagaagcgcttttacaaagagtgcgtttgatcaagaatgcaaaaaaggaaattattctttctacttttgcatttcaatccgatgaaagtggaaaattgatcttaggagcactgcatgatgcggcagacagaggtgtacatattcgtctgttagtagatggaatggagagctggattgatatggaaggaaatccgtatttctatggattatcttcccatgagaatgttgaaattaaactgtataataaggccaatccgttgaaaccgtggaaaataatgggtagaatgcatgataaatatttgattgcagatggaaagagatatattcttgggggaagaaatacatacaattatttcctgggtgattttccgggacataagaactatgacagagacgtgttagtggtttgcgatgaacctgagaaagaaaattcagttaaccagttgttagagtattttgaaacgatatgggaacaagaagacagtgattattttcatgacaataaaaaactggcaaatagaaaatctgtaaagaacgcagttttagagctgcagaacggctatcagaaatattttgaaaagaataaggaaagaatctgcgataccgattacacggacgaaacttttgagacagaaaagattgcattagtgtcaaatcctattcacacaggttccaaagaaccagtagtgtggtatcagttgggagaattgatgaaaaatgcaaaaaatcgtgtgaagatccacacgccatatattatctgtaatgatatgatgtataatacatgggaggagattgcagagaacgtttcagatttttctatcatgacaaattcagttgcgaataatgggaatccatttggggctgccgattatgcgaaaaacagaaatagaatcttaagtacaggaattaatatctgggaatatgaaggcggttattcataccacggaaaaagtattctgattgacgatgatctgtctgtaatcggttcctttaatatggacatgagaagtgcatatctggatacggaactgatgcttgtaattcgcagtaaagatattaataaacagttggaagagggcatgatggaatatgaaagagtgtcccgccaggtattggaagatggaacctatcgtgatccatatcatgtagagccaatcgaattaacaaagaaacgtcagagaaaaatatttttggtacagcatctgcttggatgggcaaggtatctgttttaataaggaggaaggaaaacgtgtttcaaatattgattgtagaagatgataaagaattaagccagctattccaaaaagtgcttgagaagaatggatatcaagtcaaaagtgcatcggatggagcacaggcattagaagtattggttaaggaatatattgatctgatcatttctgatattatgatgccggttatggatggttatgaactggtgtcggaactccgttcagcaggatatcagatacctgtacttatgatcactgcgaaaggttcctttgatgatatgcgccagggatttctttcgggaagtgacgattatatggtaaaaccggtaaatgtgaatgaaatggttttaagagtcggagcactgcttcgccgtgcacagatactgaatgaacacaaaattgtgatcggttcaacagagtttgattatgatgcaatgacggttacaactgataaggaaagtcttgttttgcctaaaaaagaattcctgcttttatataagcttgcagcttcgccaggcagaatatttacaaaacaacagttgatggatgaagtatggggatacgagacggaggcagacccacatacgatagaggtacatataggaagaatcagggagcgtttgaaagataaccctgattttgaaatcgtaacaatgcgtggaattggatacaaggtggtgaaaaaataatggaacaaaagaaagaaaaaggattgcggatccgatcctgtctgactggtgcaatctggctggcacttgtattttcaacagtcatatctgcgttattatttgcttttttgaatcatttttttaatctgccgggcagcatacctgtgcttggctggcttttgattttcaatacattgattgcagggctgatcacttcctttattaatgcaaagttactggaaccaattacaagacttagtaaagcaatgaaggaagtttctcggggagattttgaacagcatttggaaacgaacagccgtatagcagaagttggagaatcttatcaaagttttaacgttatgacaaaagaacttcgtgcaacagaggtgctgcagatggattttgtatctgatgtttctcatgagtttaagaccccgattaatgccattgaaggatatacaatgctgcttcagggagaagaactgtctccggaacaagaggaatatgtagaaaaaatcttatttaacacccaaagactttccggattggttggtaatattttgctgttatccaagttagagaatcagaatataccaatgaaaaaaacagaatatcgtctggatgaacagatccgccaggcagttctttcattggaaacaaaatggacagaaaaagaaattggttttcaggtagaattggaggaagttaaatatactgcgaatgaaggactttttatgcatatctggataaatcttttagataatgcgattaagttcagcccttcaaaggggacaattacgatgtttctgaaacaagaacaggattctgttaagttcattctggaagatgaaggaccaggaatagaggatgatgtaaaatccagaatatttgacaagttctatcaggtagatggatctcataaagcagaaggaaatggcctaggtcttgcacttgtaaaacggattgtagatagtgccggaggaacaatcaaagcagaaaaccgtgaatatggtggatgcagatttgttatagagctgccaaagcagaaagatgagattatctagttttaagataaattagaagatgggaggatttatatgacattttatcaggagttgcagttaaatcaggcaggttctaaaaacctgttgaaaaagagtgaaacactaaaagaaaaactatatcatatgtgggtatatctggtgaagatagctgctacaatggcattttgttttttctttgttagtattttcagcatcctatttggaaatgagaacagcattgtaggtgtagtagtcttattatgtctcatggtgtttaggaatgcggatctggggatccacaccggacaatctacgatgcttttggctttgttctttgtaattatgactgtatgtccgcatttagcaaatcagttttcaccggtattgggaatgctgttaaatattgcggcactggctgtgttgattctgttcggatgccataatccatccatgtttaatcaatctacattggttcttgggtatctgctgctatatggttatgatgttacgggaaaaagctatcagatgcgattagtcggaatggctttaggtgcagcacttacctgcttcgtattttatcgaaatcataaaaacagaacttataaaagaaatctgaaagatctgatacaagaatttgatatcacttcttccagaacaaaatggcagctatgtcagattttatgcgtaccgattgtcctttgcattgcagaactttgtaatatgccacgtgcaatgtgggctggtattgcggccatgtccgtgattttgccgtctatggaagatatgcactacagagtccgtaaaaggattgccggaaatattgcaggtgttatatgttttacagtattatattttctgcttccttcgtcaatctatgcatatataggaattcttggtggaatcggtgtaggattttcagcacaatatggctggcaggcagtatttaacacatttggtgctttagccattgctgcagagacatatggactacaaggagcggttagtcttagagtgagtcaaaatgtttttggtgttgtgtttgctttagcattttgtgttatattttattggtttatgcctaaaaaaaaggaaagtgaggtgaccgtacatgcagagtgaagtgaatcaggaagaaaatttgaataccactgattttgacgagcacttcgctaaaatttcgtcctatattgtagacacattgcacggcgttccacttgagatgaccgaggatgaaaaagaacaatttcgcatacaggttatttcaaatcagtatgcagaacggttgctatatcttcggcacaagtaagcttaacttctgtgttcggaatgggaacaggtggaaccttaccgtcatcgacaccgaccgatctgactgaaccagtatatcacatttctgtgcttctgtccagtatttcttagaaggacgtgccttcaaaactgaataatcactgctaacattttttcgttgacttaaaagtctcaagcgaattgtggtcaagccctcgacctattagtacacgcttgctgaatggattattgatgcttgggagtcagacagtgtcagataaatgtcattgtcaaaagggaaacagcccagatctacagctaaggtcccaaagtcaggttaagtggaaaacgatgtgaagatacgtagacaaccaggatgttggctcagaagcagccacacattcaaagagtgcgtaatagctcactggtcgagcgtctttgcgcggagaatttaacggggctaaacctgacaccgaagcttaggcaatacagcaatgtattgggtaggggagcgttgtatacgcggtgaaacagtagcgcaagcggctgtggagtgtatagaagtgagaatgccggaatgagtagcgcgaatgcagtgagaatctgcatggccgaaagcctcaggtttctggaggaaggttcgtccgctccaggttagtcgggagctaaggtgaggcctaacggcgtagccgatgcacagacggtagagattccgtcaccaccaaaagagttaaacacagggacacatttgaagtctcggagccgggtgttggttccggtagcgatcgagggaaattagtaccgaagtccgggatggaagatggcgagaaaagctgtgtgtatttctgcggtgcccgtaccgcaaaccgacacaggtaggtaggaagaagattctaaggccaacgggagaagggttgttaaggaactcggcaaattgaccccgtaacttcgggagaaggggtgctccagagatggagccgcagagaatcggcccaagcaactgtttaccaaaaacacaggtttgtgctaaatcgaaagatgacgtatacgagctgacgcctgcccggtgctggaaggttaagaggagatgtgcaagcattgaatcgaagccccagtgaacggcggccgtaactataacggtcctaaggtagcgaaattccttgtcaggtaagttctgacccgcatgaaaggcgtaatgatttgggcactgtctcgacagcccgcccggcgaaattgtagtaccggtgaagatgccggttacccgcgacaagacggaaagaccccatggagctttactgtagcctaatattgggtttcgatgttgcatgcacaggatagatgggacactgggaagcaagtgctttggcatttgtggagtggccgttgggataccatccttgcgatattggaattctaacctgcgcctttgaatcaaggcgggggacattgttaggtgggcagtttgactggggcggtcgcctcctaaagagtaacggaggcgttcaaaggttcgctcagcttgaacggaaatcaagcaaaagagtgcaaacgcagaagcgagcctaactgcgagactgacgggtcgagcagtaacgaaagttggagttagtgatccggtggtatgtgagtggaaatgccatcgctcaacggataaaagttaccctggggataacaggctgatctcccccaagagtccacatcgacggggaggtttggcacctcgatgtcggctcatcgcatcctggggctgtattcggtcccaagggtttggctgttcgccaattaaagcggtacgcgagctgggttcagaacgtcgtgagacagttcggtccctatctgtcgtgggcgcaggatatttgatgggagctgttcctagtacgagaggaccggagcggacgtacctctggcgcaccagttgttctgccaagggcatagctgggcaactatgtacggatcggataaacgctgaaagcatctaagcgtgaagccgacccaaagataagatatcccattgtttcaaacaagtaagaccccttgaagactacaaggttgataggcacgatgtgtaagtggagtgatccattcagcaagcgtgtactaataggtcgagggcttgaccacaattcgcttgagacttttaagtcaacgaaaaaatgtggttcttaaacgcttggctctcatccacaaacaacctgtctacgcccaattgttcaaacgtaaccacatcatctttacggtctgtgccttgcagcttttccaatttctgtttcaaagacttgcgcagcttttccagctgctttaccgtgaaatgctcgccaacctgtgctttcgcttcttcgatggcctcctcgatttcatccatctgttcctgaatcagacgctcctgtcgttctgcggacaagggtatcttttcaaactggctgtgtccgatgataaccgcatcataatcaccggtcgcaattctcgcacagaattttttgcgattactgggttcaaaatcttttttgctggtgaccagcagctttgcattggggtacaggcgtaaaaattcgctggcccattgttccgtcaaatggtttggcacgacaaaaagacttttctgacacaagcccagacgtttcagttccatagcggaagccgccatctcaaagctcttgccggcaccgacttcgtgcgccaaaagggtgttatacccatacagcacatgggcaaccgcattgcgctgatgctctcgcaaattgatctccgggttcatgcccacaaaatgaatatgacttccgtcatactcacggggtcgggtgctgttaaaaagctcattgtacctcttcaccagcagagtccgccgctgcggatctttccagacccagccagcgaaagcatccttgatggcctgctgtttctgctgggcgagggtggtttcgttttgattcagcacacgcttttctttcccatcctcctcgatggtatcataaacgcggctatcacgcaaattcaaggtgacttcgtcaagaggttttcggtaatttttctaaattcatcaggttgtctgcaaggaagtcccgtgtaacctcatgtctgcacatatccttgaacatcttttcaatcggttttttggcggtttcggactgcttcccacacacaataaaggtggtctttccaatctgcaccgaataactcgaattctgattttccattcgatttctccttttatcgtcattttccaaatttggctggcagactggcaactgtgggtgtaccatgattttcttgccagccaaaattttttgccagtcaaatggcttattccatccaaaagaccttcttgcggccttccacgatcttgcttttcagggcatcgcccagttcccgtttggcatctcggacggttcggccgggaatgcccctttccagcgccgccttgtcgatgtcctcgctgagcccctgctttcctccggcaagcagggcacagatcaggtctttggcttgctgggtcttggtttcccgctgcggctcgatgccggacagcatctcgtctgcggtaatgtcgtactcgccgacccagcggaagccgccctcgtcccccagagagaacgccaacgacacgcccggcggagcaagagaacttttctcatgcgtcaggatgcgcatggtcgggtcgtgcttcagcttgccgatgaacataacgctgcggacggcggcggcaatgtcgatggagccgagcccccgctgcaggctctgcattccggcggctttattcaggtgcccgatcagcaaaatagcgcagcctgttcgctgcgctacctgtcccagccgcatgaagatcggacggacttcgttcgcccggttcatgtccacatcggcaccgagatacgcctggatcgggtcgatgatgaccagtcgggcgttgttctcgattatggctttttcaattcgttcatcggagagcgtcagctgcacatcgctgtcatcaatgaccagcacccggtcaaggtctgccccggcttcgatcaggcggggcttgaccgtatcgcccagaccgtcctctgcggtctggtagattacgttgaatggttccattcgctccatgttgggcagcagctttccgctggtgcaagcggctgcaaggtgcatggcaaagtaggtcttgccctcaccgggattgccttgcagcacgctgagttttccaaagggcagatacggcttccaaagccactgctgtccttcatcgaactgttcccgaaaaactggcagcagcacaattatctgtcgctgggcggggtgtcgggcaaggcactgcggcagtttctttctgaacgcccggacgtggagcgggtgttcctctgtctggatgccgacaaggctggagaggatgcctgcaagcggctgacggcgctgctgccggacacggtgagcgtgacccgcatccagccctgcatgaaggactggaacgatgttctggtgcaccgggcagagatcccgaaccgcaattatttcaaaagcattgtgctgaaagagccgtcaaaaccggaaacggtgaagatcatccgcatgagcgacgtggagctgaccccggtggagtggctttggaagccgtatctgccctttggaaaactcagcgtgctgcaaggcaatcccggtgagggcaagacctactttgctttttccaacacgaaaataggttccgttacaagttctttcgatattgttcaattttcaaggtcctgtgcgccgcagccttagtggctgacatcttatttattctatcactttcgtgataaattgtcaagcacttttttgaaagatttttgagattcatttttgattctgtcgaatctctccgtttgacgtcgtttttgaagtatttcattctgtcggacgtccgcctgacagtaatgtattttagcacagcatccttcaaaaagcaagcacttttttacaatttttacgccaaaatcattcttttgactttttgcccagttttttacattttttatagacacttcctcccttattcctccaaaagccgggcgcgcagccggatcaggatcttacgttcccgcctggagatctgtacctgtgtagtatgcagtgcttttgcagtctcgctctgggtgcggttgccataaaagcgcagacgaatcagttgcttgtcctgctctggcagcgcttcgatcacctccgccagactgatccggtctgccagttcctcctccggagattccaccgggatatccagctgccggtctccatcctcgccgccctccggggtcaggctcatggcgggctgcgcggcctgtatggcaagggctacattctctatcggttcgtccaactgctctgccagctgctgcaaggtaggctctgcgccgcacagcttcatagtatgctcccgtgctgcctgcacccgcattcccagttctttcagagagcggctcactttgactgtaccgccatcccggaacagctttttgatttcaccaaggatcaccggcacggcataggtggaaaagcacacgccccggctctcgtcaaaattatcataggctttgatgagccccacgcagcccgcgctgtacaggtcgtcatactccatgcctcgcccacggaatctgcccgcacaggcgtgcaccagccccagattctgcgtgatgaatgcttcccgccgggtcttatccgttaccatataccggaccgcctttcctttttatgtaggctcccgccgggacaaacgcttgactagcagcacccttgtacctttaccgggctttgaggtgaccttgaccctgtccataaagctttgcatcaccgcaaagcccagaccggagcgctcttccgggttgccagtggtgaacaacggctgcatggcctgctccacattggggatgccaatgcccttatctgtaatggtgatgtgcacctcccggtcggggtagaccgctatggtcatgcacaccggcccgatatgctccgggtaagcatggacgatgcaattggtgaccgcctcggacactgcggttttcaggtcggccagttggggcacggttgggtcataccgcgccagaaaggccgccgtgacgccgcgggcgtaggcctcgttgctgctgagggaatcaaactggacacgggtgctgttctctgctttcattgcgtattctccttttctatattctccgtacaggggattcccgccagccgcaggactttttgcagctgtgcgggggcgtgctgcaaccgcaggctcgtgcccagaacgcgggcgcagcgctgccgcccaaggatgagcccgatgccggaggaatccatgaaccctaccccgccaaggtcgataattagggtgcggggactgcggctgaccagtgcatcgtccagctgcatccgcaggctctgggcggcatcgtggtcgatctcgcccgccagataggcgtacagggtctcccctgccgcgctgaaggtcaccgttgccattgcttgtccatctccttttttgcaaaataaaagatcccgtacacataacttcagtgtacgggatcttcgggttattttttagaaaaagctgtcggcagcttacgcctttgccagcagctcggcagcttccagcgctgccgcctcgctgccgcagaccagcagcccacggcgggtgttggcgtgcgccagctgcaccgcctcgtccagactggtgcagagctgggcgtcaaagtgatactttgccttctcggtcagacgccgggtcagctgctcctccacaccggcgggcgtgacgagatacaccttatcaaaggggctctcgctcatgccgggcatggtggatttatcctttttctgttcctcagggctcaggccggtctccagcgcggagaagaaggcttcggcgccctcctcctcggtcaggccgatgatagcgctcatgtggcgcaccttggccatgttcaacacgcgcagcagcgcggcagcctgctgcggagtgcggcaggcatccagaatgaccagcgggcgctgggaaagcacccggatgctgcaacggttgtccacggcggcaatgccatccagaatggcttcatcggagatgtccacctctttgcggcagagcgccagcgccaactccaccgccatggcggcgttgcccgcagcgtgacgccccagaaaggccagcggcactgtgtagccgccgtagtccacccggctggcaaactgttctgcttccagaaaggtgatatcctccgggtcgggcactaccagctcacagccgcacttgcccgcagccacgatcagctcactgagcaccgccttgggctgctccggcgcggtgacgcagatgctgtccttgcgcatcacaccgcccgccagcgcagccagacgttccaccgagcggctcacgccatccggtcccaccgctgtgacggcgcacaccggcattttgggcagcaccgcagcaagccctgcgtccggcagctctactaccgccagcgtgcagccggcttcgccaaagcagtacgcagcggcaacaagctctgccgcctgcaaaggcagctcctcatgggcagcaagggcatcggcggcgcggcacagcagtgcttcgtccaccggcttgccatccacacggatgcgggcagcaagcggctcgcacccggcatggtagacaccggcacggatcccctgcgcgtgcagaatggctgccagcagacgcgccaccgccgttttaccggcagtgcctgccacacccacgaactgcacctgctgcaccgaggcgggcagcagcgcacccagctgcgccgggtcggcaaagccgtccggcagagctgcaaaatactgatttgcctgttggatggtcattcgtatctcctttttatgtgataatacagtccctcgcaggccagcagcagtacaatggcaacaaggatgccggccagaacaccggcagagtccagccacacatcggtgacctgactgctgcgtccttccgaaaagagctgaatggtctcatcggtcagcgccgtcagcacaccacccagcatgggcacggtgatatgccgcagcgggtgacggctgtacacccgcatacagagcatgagcagaaagccctccagcgtatactcgcaaaagtgtgccagcttgcgcacgatgtgcatggtcagatgctctgccagccccggctgccccaagcggcgcaggatgatgcgcatccacgccagcacccggccgctggagtcggtggagaccgtcgccaccgccatggagttggaaaagatgaaccagatacaggcgatgagtgcaacggtaaagaccacacgtcccgcaatgacccacagcgaggtgcgttccgtatcgttatagcgttccacagtctcaacccagagccttgatgctctgctcaatgttggccagcttgtcctgactcttggcgaactttgtgcggatttcctccaccagagccgccggggcacgctccacgaacttgggattgttcagctggttgccgaacatggccatttccttttcagccttagccttttccttgttcaggcgagccaattctttctctcggtcgatgagctccatcatggggatgaagccgcgggcagcgtgggtggacacctgtaccatgccatcggtgctgccctcgtacttttcggtaaaggtcacatcggtggcaaaggcgaacttggccagatagacctgtgcgttctggaagggggctgcatcggcagtttcgatgatcatgctggtcttttttgcgggatgcacattcatctcggtgcgcatggtacgcacagccttgatataatccatcaccttttcaaaggcttcctcttcagcggcccagttgtgagcggcgtcaaaggtgggccaagcctgcgtcatgatggtctcggcagagccgggcagagcctgatacagttcctcggtgatgaagggcatgaagggatgcagcagcttgagtgccttatccagcacatacaccagcacacggcgggcggtatcggcctgctgtgcatcgccggagttcagacggggctttgcgatctcgatgaaccagtcgcagtagacatcccagataaagctgttgatcttggcagcagccagacccatctcatagtgttccagattgtcggtcatggcaccggccacctgattcagcttggtcagcacccacttgtcgctcatgtccagcagctcttcacagggcagacccggctcaaagtcctcaggcaggttcatcagcacaaagcgggtggcgttccacagcttattggcaaagttgcgggcagcctccaccttcttttcgatatagcgcatatcgttgcccggggtggaaccgtccaccagcataaagcgcagagcgtctgcaccgtactgggcaatgacctccaacggatcgatgccgttgccaaggctcttggacatcttgcgcccctgactgtcgcggacgatgccgtggatgcagaccgtgtcaaaaggagccttgccggtgtaagccagaccggagaagatcatgcggctgacccagaagccgatgatgtcgtagccggtgaccaaggtgttggtggggtagaaatacttgaggtcggcgctgtcctcgttgggccagcccagcgtgctgaagggccacagtgcagaggagaaccaggtatccagcgtgtcggggtcccgcgtcagctttgcgctgccgcacttggggcagctgcagggagcagactttgccaccacggtctcgccgcagtcgtcgcagtaccaagccgggatctgatgaccccaccacagctgacggctgatgcaccagtcgcgggtgttcttcatccagttcatatagttcttggtaaagcgctcgggcacgaacttgatctcgcccttctccacgctctcgatggcaggctttgccagcggctccatcttaacgaaccactgcttggagaccatgggctcgatggtggagtggcagcggtagcaggtgcccacctcgtgcttgagcggctcaatctccttcaggaagccgccctccttcaggtcggccagaatggccttgcgtgcctccagcgtagtcatgccggcatacttgccgcagtccagcacctcaggctcgttgacggtgttcttgccggcggcaaacagggcatcggcggcagccttgtcggcagcgccggtcatgtggccgtcgtaagtgaacacgcgtacgatgggcagatcgtggcgcagaccgacctcaaagtcgttggggtcgtgggcgggggtgatcttcacgacaccggtgcccttggtcatatcggcgtgctcatcgcagacgatggggatttccttgttcagcaggggcagcaccacatggcagccgtgcagatgggcgtagcggggatcctcgccgttgatggccacggcggtatcgcccagcatggtctcggggcgggtggtggccagttccagcatctcgccggtctccttgaccgggtacagcagatgccagaagctgccgtccttctcctcgtactccacctcggcgtcggaaatggaggtgttgcagtgggggcaccagttgaccatgcggttgccgcggtagatcagccccttgtcgtacaggcgcacgaacacttccttgacagcctcagagcagccctcgtccatggtaaagcgctcgcgctcccagtcgcagctgctgcccagctttttcagctggctgacgatgcggttgccgtacttggttttccatgcccaagcgcgctccagaaaaccatcgcggccgaccatctccttggtcagaccctcggcgcgcatggcctccaccaccttggcctcggtagcaatggaggcgtggtcggtgccgggcacccacagggcggcgtagccctgcatccgcttggtgcggatgaggatatcctgcatggtgttatccaccgcatgacccatgtgcagctgaccggtaacgttcggtggcggcatcacgatggtataaggtttcttgtccggatcggccttcgtgtggaagtagccgccgtccagccagaactggtagatacgatcttccacctgactgggatcgtactgctttgcaagctctttcatagtgtcctcccaaaaatttgatgaagtgggacgcaaaaagccgccccacggagcgttccatgggacggctgtaaatacataaccgcggtaccacccaaattgcgcggaaggttccgcgccccttgatgcccctgtaacgtagggcagacccgaaagcggcttaccggcaaggctcaccgctcctgctccaaagtgacagtgccccgccggtatcccgccgggttttcagctgcccccggctctctgtgcggtcccagacgatgcacactctttttcaacgcatttataaaaagaatataacgttttttgtgggatttgtcaatcagtttttcaaacctttcacccaccgcaccagcttccatgcctttgcgcccagatgcgggcagtagcttaccatcagcgcctgcagcttctggctttgatttcccggcggaatctcccacgcagcatgacggtgcagctttgctgttttcagcaccattttttccttctcggaatcccgctccggctggttgaccagccggaaatatacctcggcgcaggacatgacgcagcgctgttccgtagtgctgcggaaggggtccggctgcccctttaccagctgccagatctgttcccacgccagtgccgccgtgtaaaagcgcaggctcggctcctgccgcacggcagagcttggacgttcaaggtaagcatacagcgggcagttcaaaaatgccagactgcctgccttgaggaattccgttacaaagaacagggcatcctccccgtagaacagcgccgggtcaaagcgaacatcctgcagcacctcccggtgggtcagcatccgccagcagtgcccgccgctccattcctgcatccacgagtagttttccgtcgtgattttctgcggtgccgggcactccgtcaccgtccacagagtctcgttttcccgtatgctgcggtagcggcacatggcaatgcgggtaccgcagctgcacaaagcatcgtacagccattccagatactgcggcagcacaaggtcgtcggaatccacaaagcagatatactcgccccttgcctgctccagcccaaaattgcgtgccgaggacaccccgccgttttccttgcggaaaatacacacccgggcatcctgcgccgcatactgctgcaaaatttcccagcatttatccggcgaaccgtcatccacaaggagcagttcaaaattctgatacgtctgcgccaacaagctgtccagacatgcaggcagatacttttccaccttataaactggcacgatcaccgagatcagggggattttttctgtattcatccggctctcctttttaaaatttccaacccacgccgcttcagctccgtgtactccacgctgcgccggtagaacagtacgatcactcctgcgaacacagctgtgtaaagcagcccatccagaataaaaatgccgaaattgcccaccgggaaccgctgcacccacagcaccgctgccgcagagactgctgctgtaaggagtgtgcgcttcagatactctgcaaaataatcccgaagtttcttctgccatgcatcctgaacgccatacttcaaaaagatgtagggttctacccaggcacaggtacacagcgtgctgatgatggtgccccagataatgccggtcacgccgtactgccgcaccagtacaagcgaggccaccagattgatgatggattccgccaccgctttgtagcggtcgttccagaacagccccatggcctcccggaacagcagattcgtctgccgcattcgtgtaatgtaaaactctgccacaatgaccatcacggtggtcatcgaaaaacagtatttcccgccaaacaacagcgtgataaaggggttaaacagcatcatcagcccgccggtcaggtaagcggacatgacaaagaacataaaatccatttccttatagattttatacagccggtccgaattttccattactgcaaaattgccgatactgccggaaaaagccacagcaaattttcccatcaggttgttcagtgcattgatcaccaaccggtaattggagtaaaggcccaccgtcgcaaggccaataaaggaggacatcagcagactgtccgtattgcgcacgatgatggttgacagcttgtgcatactcatggcaccgatatttttcaggatgccgttccgttcctccctttctggcagctcatggcattccttcaggtatggaaactccttgtccaccatgcgggaaaccataatgttgggtaaaaactgtatcgcctgctgaaccgccagatacaagatgaagttccgggtcaacagcagcaccgtgatctgcgaaacagtcttgatgcactcgcacgccatactccatcctgcgcagatatagcctttctggtaggcctgatagatggaatttttataactcaacagataggaacttgctgaaccgagcacatatatcatatagatcagggtgatatgttcaatgccctcgccgcccttgatgaggtagggcagaaacggcagcagcaccaacccgaacagcaacaccgagactgccaccgcccggtacatccacttgtacaggttcatcagccgcgccagtttctgctcgtcatcccgggctgccggttcatacatgctgaacaccatagccgtaccgatgcccagctccgcaaaattaaggatgctgagcacatcggtaaacaggccgttgacccccagatattccgctgaaaggcagcggatgaacaccatccggttgatgaaggacagcagcatcgtcaaaaactgcccgccgatgttaaacagcatattgatgatcgaataacgtgttctcatgcgatttttaattctcccctgcctttgatgttccgcagccacatatattcccgcggaaatagccgcaacagcaggctttgcagccagagtcccgccggaacggtacaatactgccgcgtccggtccaccacatcaaactgcatccgcagcatttcccggctgcggggtgccttgcgcagcgccgggggcagctgccggtacacccggctcacgctgcccatcgtaaactttgccgcatttgccagcgcatcgtatacctcgttttccacgaggcagttccaataccgctgtgcggcctcggcagcatcaaaatggcgcagcgttttacttccgttcataatgctgctgccgcgctgcacataataatacagctcctttggcaccaccacggcctttttggtgttcagacagatttctgggagcacaaaaatatcctcgttcagcttcccctccgggtagcgcagctgcgcaaagatagcgcggcggtacagcttgttccacgcaggctgcgccatcgtattcgtggctcttttcagcagttcccgcccggtaaagatccgctgtgcaagcccggtgtacggcggcaggcagggtatgcctgcctcgtccaccgcagcgtaatcgcacagggcaaggtctgccccggtgctttgcacggccttgtacagtgtttcgtacatttccggtgcaatatagtcgtcggaatccacaaagccgatccactcgccccttgccacatccagcccggcattgcgggcagcagaaagcccgccgtttttctggtgaagcacccggatgcgggcatctttcgcggcagcggcatcacacagcgcagggcaaccgtccggcgaaccgtcctccacaaggatcagctcaaagtccgtaaaggtctgcgccagaatggaatcgatgcatttttgcagatagttttccaccttgtacaccggcacaatgatgctgagcaatggtttttcgcagggcacagcgtgttcctcccgttttatcttttcagtccgtcacctcggtgcgcaggcgggcaatgagccgttccatcagcgccacccggttgaagggggtcatcaggtaaaagccgtctgcataaggtgcagccgccttggctgcctgcaccgagacttccaagcccagttcctcacctgcggcgcggtccagcccttcaaacttctggatgatggcatcatccacatggatgccgttgacctcgttttccataaagatggcgttgcgctggctgaccaccggcaggataccggccagaatttttgcgcgctcacccagcgtctcccgggcttttttcaggttttccaccgcctgtgccgacagcaccggctgggtaaggaagccgctcatgccgttttccagcttttctgcggcgcggcgcagctctacctcaaaattgcgggcgttcaggttcagcgcaccaaaaaccgtgatgggtgcgggcatctcccgcccctctccggccagcgacacgatatactgtgccagcttgcgggagttgaactggtacacatttttcacctcgtcccgctcggcggtgggaatggggtcgccggtaatagccagtacctcccgcacaccctcggcgtacagtcccagcagcagcgccttggtggcattcaggttgcggtccctgcaggtcatgtggggcagcacgttcatgcccagctcccggtgcacccggcaggccaccagcgaggaatccatccgcgcccgggcaatggggcagtctgcaatggtcagcaggtcggcaccggcggcctgcaggcggcgggcaccctcgagataggcggtcaggtcggcgtccttgggggagtccagctccaccgcgatgacccgctgcccggtgcgcagcttgcgcaaaaaggcatcgtccgttttccctgcaggctttgccgctgcagcgggctttgccgccggggcggcgggcagcgcttccggcagagcatccagcgcggtgcgcagggcagcaatgtgctgcggcgttgtaccgcagcagccgcccagaatgcgcacgccctcggcggcaaggcggctcagctcccgggcaaaatactccggcttgccctgatagcgcacctgtgcccgcgccaccaccgggtagcccgcattgggcatgaccgaaagcggcagtcccgcatcccccagctgctgcaccagtgcccgcatcgcgcccggggcagatacacagttcaggcccacggcatccaccacgccgctctgtgccatgcggcgcaccagctcagcacagtaacgtccctccctggtgtagccgtccggcagcaccgcaaaggataccagcacaaaggcctccggcacggtctgcttcagcgcacgaatcgcttccagcacaccgtcctcggcgctcagggtctcgaacagaaaattccgtgcacccagcagcgcaaagcgcttcgccacagcaagatacacctgctccgccgggagattttcggtatccggtgcggggccaaggtccgcaaacactgccgcgccggtctccccggcggcctttactgccagctgccagcctgcatccgccagctgctcccagccgagctgctgcgccgccgccagacgcggcaggctgaaggtattggtcttgatggcgtccgctccggcagcaagatacgcccggtgcactgccagaatgccctcggggtcggtcaggtttgcctgctcgcattcctgccccggttttgctttataataggtacccatgccgccatcgaacagcagcggccgctgggctaacagtttgcgcacatctaacatcggtactttcccttccctataaaagatttcacctttcagtttatcgtagttcacccatccggtcaagcggttttcttgatttcgcttgcggcgcggtcgtttttgtgctatcttaggaataacttttgagaaaagggagaggatggatcatgcgccacaccggcacacctgaactggagaccgaccgtctgctgctgcgccgtctgctgccgcaggacgccccgcagatgtacgaaaactgggcaaatgacccggctgtgacccggtttttgcgctgggaaccgcacaaaagccccgccgagacccgggaactgctttcggcgtgggcagagttgtatccgaacccggattattaccagtgggccatggtagaaaaggccaccggacaggtgtttggctccatctccgtatacaacgccctgctgggtgagccgcagcaaaaggccaagtggccggggctggaactctccggcggcatctgggagccgggctactgcatcgggcagaagtggtggggcaagggccttaccaccgaagcactgcaagctgtggtggatttctggttcaatcaggtgggcggtgccttcctcacctgctgccacgcggtgcagaaccctgccagcggccgggtgatggaaaaggccggctttgtgtaccatcacaacgacgtttaccacaaatttgacggtaccccggtggaatgccggtgctatctgctgacaaaagaacgctacgataacagaaaggacttactttgagcgagctttatgatattctgaccgagacccctcccacaaaggtggtgctgctggcactggatcaggggctgtgggactgcgagcgcagtctggcggagctttctgccctgtgcgaggccaaccacatggaagccgtggcgcagatcacccagaagcgccagaccccggagaccggcatcgtgctgggcagcggcaagctggaagaggcttcccttgccgcccagacactgggcgcggaatgcgccgtgtttgacggtgaactgaccggcagccagatccgcaacatctccaacgcgctaggtgggctggaagtcatcgaccgcaccatgctgatcttggagatcttccgcagccgcgccgtgaccaacgagggcaagctgcagaccgagctggcgctgctgcgctaccgtctgccccgcctgcagggcatgggcgaggcgttgagccgtcagggcggcggcggtggcggtggcggcggtgcccgccgcggtgccggtgagaccaagctggaactggatcgccgccatgtgcacgcccgcattgatgcactggccgaaaagctggccgagatggaaaagcgccggggcgagagccgcaaggcccgcgccaagaccgggatgccggtggtaagccttgttggctacaccaacgtgggcaaatccagcctgatgaacgccctgtgcggccccagcgtagccgaagccgatatgctgtttgccacactgggcagcaccagccgcaagctggtgctgcccagcggcatggcggtgctgctggtggacacagtaggctttgtgtcccgcctgccccacaatctggtggaggccttcaagtccaccttggaggaagccgcatggtcggatgtgatcgtccgggtggcagacgccggggacgagcagcgcgaggagcagctcgccgtcaccgacgaggttctggatgggctggactgcgccgatatcccccgcttgaccgtgtacaacaagtgcgacaaacccaacaccctgagctttgaccccgacattctgctgaccagcgccaaaaccggctacgggctggacaagctgctgcaaaagctggacgaggtgctcagcgaccgggtgcacaccatccgggtgctgctgccctacgacaagcttgggcttgccgcccccatgcgggagcgcggcagcgtacaggtggaggaataccgggaggacgggctgtatctggaaggcatcgtcaaaaccgaggacctgcactgctttgagggctatctggtctaagcggaataatattttgatctagagcaaacccggaaagtctgcggactttccgggtttgcattttcacgggtggggtcgtgaccggaaacagctgctctatgagccaagtacgttgtctaccactgcttttttcataaataaaaagccccaacaaacacaaaaacccgcctggcagcgggtttttgtgtatagaggggtgggaaagtatataaagtggtgaatctcaatatcattggcagacttttattcattgcgctgccttgcatgatgtattatacccgtttttcttttcttgtcaaacaggattttcggattttgctttaaaataatactttacttttttgcaaaaactttatataattaacatagaatttcagaaacgaaattttattccatttccgtgggtttgcacaacataaaaactttactttcagaaaattttatacaatccaacatattttgaaggaggctcttctcatggacgatcttgaccgcaaaatcctcacccttctggcaaaaaacgcacggatgcccgtcaaagaaattgcggagcaggtgtcgcttaccagcccggcagtctccagccgtatccataagctggaaacggacggcatcatcagcggctataccgtcacactgaaccgtccggcagaccggatgtatgtggatgcgctcatcagcctttcggttgccccctccaagcaggatgcctttctggagctgctgcaaaacagccgcgaggtgctgcaatgctaccacgttaccggtgcgtacacctttctggtcaaggtcagctgcggcagcatggcacagctggagcacctgattttgcagttccagaagctgggcaccaccagcacccagatcatcctgtccaccccggtgaaccacggcgatctggacgctttgatgctgtaagcgagtgttgttcataaaactgttactttttccctgcaattttgcggtgcggtggttcgtatccagaatagcagcccaaaaccggcacacactacctgtaacgtgtgcgcccggctgcaccttccacacacagcactatgaaaggaaatgcaatactatgaaaaaattcatcgccgccctgctggcagggctgactctgtttactttggtgggctgctccggcggaagcaaggccgacagctccacccccaaggactactcccagatcatccacgacgcccgcagcgacgaggacaacgagtacgatatgatctttaccaagggcgaggacggcaagtttaccgccattgacggttacagcgccgagtacaaggccgaccagctgaacgaagagatccgggacatcctgatgcccccgctgaacctggaggatgaccagtataccgcctttgccgccagcatttccagcatgatggtgcgcagctacgccgttgccatcgtgaagcccgccgagggcaagaccaatgaggtgaaggccgcactggaggcctatgttgccagcgaacagcagtccatggagcattatctggaggatcagtacctcgtggctaaggccgctaccgtcaccgtagcccccaccggcgaggtggttctggtttgcgccgaggatcacgacactattctggccaacatcgaaaaggctttggccgcgtaaaaagttttttgaaaccgcactctgtatagggtgcggtttctttttgcggcgggttatgctataataccccttggatccatacatccgcaggagaaaaactatgagcaaagcaaccatcgtcatccccaatatcaacggcaagggctggctgaaggactccatcgagtccatctacgcccagaccgaacaggattttgacctgatcgtggtggacaacggttccaccgatgaaagtctggaacaagcccgcagctactgcacccgccccaattttaccctgatcgaaaacgggcgcaacaccggcttttcctacgcagtgaatcagggcattgcccgggcgcagagcaagtatgtggttctgttcaacaacgatgcctttgccgagccgcagtggctggccgagcttttgcgcaccgccgatgcggaccccaagatctttgcggtgcagagtttgatgatccggcactttgagcgggaactggccgatgatgccggggactatgtaacatggatgggctttgcctgcaagaccggcgatggccgccgcgtcagccgctacaccaagcaaaagcgtatcttttcggcctgcggcggcgcagcgctgtaccgcaaaagcattctggacgagatcggcggttttgacgagcacttttttgcctactttgaggacgtagacctgagctggcgcgccaacaatgccggctacaaaaatgtgctctgccccgccgccaagtgctaccacatctgcggtgccagcaccggtgctgtgcgctacaacgcctttaaaagccagcagagcggccgcaacagcattctgctgccactcaaaaacgagccgctgctgatgctggtactcaactttatcccgctggcgctgggctatctgctcaagtgctacaagttccacaagcagggctttggcgaggcttgggataagggcatgcacgaggcctttgccctgctcaaagcgggcaaactggacaagcgtcccttccgctggcgcgatctgcccaactacatcctgatggaactgtggatgatctggaacatggtgccctacctgtggtatcggctggtggtggtacggtttgatttgaaataaaacgtacaaaaaacacccgactgtgaaaacaaacgcacagtcgggtgttttcatttacattttacgctgcggtactggcggcatcctcagcggcgggggcttctgccacggcgctgtcagcgcccgtttctgcctgcgcttccggctgcacagccgaggcagcagccgaatctgccgcagcagagtctccggcagttgccagaatggcgtcctgcacatcgctttctgccataggctccggctgcgcggcagcggagcttgctgcgctttcgggtttcgtctcactctcggtcaggccggtcagataccagctgccgctctggcgctcgaacaggtaatccatatacttggtgggggtgtccgaggaggggttgatgatgctgtcatctgcgctggcggtggggatgtagcccacggtgacgtgcagcttgccgctgcgcttgaacagcttgaccacggtggcgcggtagtagcccaccgtaccggtgatggggattttgtagcactgggtggtctcgtcaaactcgacggtcatatcctccatgtcaaagctgcggtgggtcagcttgaagccggggcccagcagctttgccagataggcgtccacctccaccgagggcagcagcagctgctcggtctcggggtcagtattgtagttttcaaagccgccctgcgtctcctgaatactgtacacacagccccacacggctgcttcccgcagggtcaggtcgtcgatgttctcaatgccgtcaaagggcatggggtcgaacagtaccaggccttccagcttgtcctcgtattcctgcttttgtgcggtatcgtcaaacaggtttgccacaaggcccacaccggcccgcagcaccgtgataaacccgatgagcaccagcaccgtgatcagcagacccaaggtctgccgccagcggcggcgcttgatccgggcgtgttcttccggggtgatcgtatttttcattggtctgagtctcccaaagttttttgtctacccaacagtataccacatccggccgcagagtgcaaaacctgtaccggtggtttttttgtgaaagcaggttttttattcccagtccttccatatttcgggctgatagcccacagtggccttgcgtccgttgcgcacgatgggggtcttgaacagctgctgattttcaaacagcttatcttctttctgccagtccaccagtgcatccagcagcgcaagggtctgcttgtcctttgctgccggatttaccagcgcttcccagccgcccaaggcgcgcgccacgttatcaaactcgccccggctcatgcccttttccttcaggtcgatcatctggaatttaatgccgcgctccttgaaatagcgctgcgcctttttggtatcaaagcacttgctcgtgccaaagatctggatattcatcttatctcctcctgccggttcccggcggtcttattgtaccacaccgtaaaccgcttgcataggcataatttgcggcaaaacgggcaatgctttccgcaaggaggtgtttgcatgaacgcattcgtagaccctgaactgtgcatcggctgtacccagtgcgccgggctgtgccccgccgtgttccgcatggagggcgttctggctgtggcagagcccggccccatcccgccggaggaggtgccgcaggccgtcaccgcagctcagagctgcccggtaagcgccatccgcatcgaggaataagcccggcatcgctaaggctgctgcacagcttgtgcggcagctttttttgccgcaggacgatttgaaatgccctccgcgctgctccgggcataagcagcggaagaatattataaatgatgcgattgtcgcggcttacaagccgcgacaatcgcatttttacgagagatggcatcacgaaaagcagccacttctcttttttgcgcaaaaagttcccgcgcggtacagttttgtgctatactataagatgtgagattacgcaacggaggaactgcattatgcgtttactggtcattgacggcaacagcattgccaaccgcgctttttatggcatcaagctgctgaccaccaaggacggacgttataccaacgccatctatggttttttaaacattctgctctccctgctcaaggagtgccagccggacgaggtggccgtggcttttgacctgaaagcccccaccttccggcataaaatgtacgatggctacaaagccacccgccacgccatgcctgaggagctggcgcagcagatgccggtgctcaagcagctgctggcagaccttggctaccgcaccgttaccgccgaaggctgggaagcggacgatattctgggcacgctggccgctgcctgcgccgcccgcaaggacgactgcttccttgccaccggagaccgggacagcctgcagctggtaagcgagagcaccaccgtgctgctggctgccaccgtgatggggcgcagcaagaccgtggtgatggacgaggacgccattcaggaaaaatacggccttgcacctaagcagctcattgaggtgaagagcctgatgggcgatacctcagataacatccccggcgtgaagggcatcggcgaaaagaccgccctctcgctggtgcaggccttcggctcgctggagggcgtgtaccagaacattgacgacaagcgcatcaaacccaagcagcgggagcacttgttggaagataagcccatggccgagttgagccacacgctgggcaccatccgcaccgatgcccccatcgacaccgccgagggttcctacaccgtgggcgagggcaacaaacccgccgccgtgcggcttttgcaggagctggagatccactccctgatcccccggttcgggctggacggcgtagcgccggaagccgctgctgaggaagaggctgtggagctgccggaagcagagctcactcccctgcccctgacccccgccgggcattatctggtggctgcccgccccgccgttaccggcaagcagggcacccgcaacgtggtattgcagctggaaagctggtacgccgtgcaggatactaccgtctacccgctggaggacgccgacctagtgcggctgctggacaacgccgatgtgacgctggatgtgttcaactccgcgcccctctacgccaaagccatggccgccggcggctggggcagcagcatcgtctgggacggcaagctggctgcctatctgctggacgcctctgcctccaaatatcagatcagcgagctgatccccgcctacaaggctgctgccgcctttacctgcaccgattacccggacgccgggcggctggccgatctgtttgcccggatgaaggccgagatcaccgcctgcggagaggatgcactgtacaacgagatcgagttcccgctggcacaggtgctggctgatatgacccgcaccggcgtgctggtggacaaggacggcatcgagcagttcggcgtaaagctgcgggaggaactggagcaggtgctgacccgcatccacatggagaccggcagcgccaccttcaatcccaacagccccaaacaactgggcgagatgctgttcgacaccatgggtctgccccacggcaaaaagacccagcgcggctggtccaccgatgccgaaacgctggaaagcctgcgcgagtacccgctggtggaggacgttttgcagtaccgcgcctaccagaagctgaactccacctatgtggagggtctgctcaaggtcattggcgaggacgggcgcatccactccacctttaaccagaccgaagcccgcaccggacggctctcctccgataatcccaacctgcagaatatccccatccgcaccgagctgggcagccagctgcgcgcctactttgttgcaaagccgggctgtgtgctggtagacgcggattacagccagatcgagctgcgcatcttggcacacatcaccggggacgagcacatgcagcaggcctttttgaacggcgaggatatccaccgcagcaccgccgccaagatctacggcattccgcagagcgaggtgacgccacggctgcgctcctcggccaaggccatcaactttggcatcatgtacggcaagggcgcgtacagcctttccaaggatatcggtgtgaccgtgaaggaggcagacgccttccttaaaaactatctggcggcttttcccagcgtgagcggctatatggacaagaccatcgcggacgccaaggcaaacggctatgtgtccaccctgttcggccgccgccgcaccctgccggagctggccagcaccaacttcaacgtgcgcgccagcggcgagcgtatggcccgcaacacccccattcagggcaccgctgcggacgtgatcaagctggccatggtgcgggtgtggaagcgcctgcgggacgaaaaaatggccagccgcctgatcctgaccgtccacgacgaactgatcgtagaggccccggaggcggaggccgagcaggctgcccgcatcctgcgggaggaaatggaaggctgcgtgcagtacgcggtgcctctgagcaccgatgtgcacgcaggcaaaaactggctggaggcacactaaaatgatcattctcggaatcgagtctacctgtgacgaaactgctgctgcactggtggaggacggacggcacctgctgagcaacgtcatctccaccagcgtcaaggagcaggcgctgtacggcggcgttgtgccggagatcgccagccgacgccactgcgagtttatcagtgctacggtcaaaaaagccctgctggacgcaggcaagaccatagacgctgtggacgccgtggctgtcacctttgcgccggggctcatcggtgcggtgctggtgggcgtaaactttgccaagggtctggcctactcggcgggcaagccgctggtgccggtgcaccatctgcggggacacatcgccgcgctctacctgacccacccggagctcaagccgccctttttgtgtctggtggcctccggcgggcacagtcacatcgtggaggtgcaggactacacccactaccacattctgggtcataccgtagacgatgctgcgggcgaagcctttgacaaggtggcccgcacactgggtctgccctaccccggcggccccagcgtagccgccgccgcaaagaccggcgaccccaaggcttaccgcctgccggtgccccatgtggagggcaagtacaacgtgagcttttccggcttaaagaccgccgtgctcaatgaggtgaacaaggcgcagatgaaaggcgaggaagtgaacgtacccgaccttgccgccagctttcaggaacgcattgcgggcattttggccgaaaagctgctgctggctgctgccgataccggggcaaagcaggtttgccttgccggcggcgtagccgccaacggccgtctgcgccagctggtaaatgacggtgcccagaagctgggcgcaaaggtctacctgccggagctgaagttctgcggcgacaacggtgccatgattgcggcacaaggctactaccagtacattgccggacacaccgccgggctggagctgaacggcctgcccaccctgcccatcgactatgaataaacacaacaccggaggtgttcccatgaccgagcgcaaccctatcctgcaaagcctgttcgaccgcaagtcggtgcgggtgtatgaagaaaagcccatccctgccgagatgaagcaggccattttggaagctgccgcacaggcgccctctgcgggctgtcagcagctgtataccattttagacatcaccgacccggcgctgaaagaagcgctggccgaaagctgcgaccaccagccctttattgccaaagcgccgctggtgctggtgttctgcgccgactgcaaaaagtggtacgatgcctacttagaggtcggctgcacgccccgcaccccgggtgtgggcgatttgatgctggcagtcaccgataccgccattgccgcccagaacgccgtggtcgccgccgaaagctttggcatcggctcgtgctacatcggggacatcatggaaaactgcgacacccagcgcagcctgctgcatctgccggactatgtgttcccggcggttatgctggtgttcggctggcccacccagcagcagaaggaccgcgtaaagccccagcgctgcgccatggagcatatcgtgcacgaaaacggctaccgcaccatggacggcgcagagctgcgggatacctttggctacaaggctggcaacaccccctttgaccagtggtgcaccgccttttgcaaccgcaagtataactccgatttctccaaagagatgacccgctcggcggaggagtacctcaaccagttccggtaatctgaaccgcaaattacagcaacaaaaagcggcagctgcacggtgttttgtgcagctgccttttttcgtttatctttggttttccgcaaacaatgcgcccagttccggcaggatatcgtggggcagcatcccgtactcgccgcgctttgcggcggcgcggtcggcggcggcaccgtgcagatataccgcacaggcagcagcttggtaggcgggcagaccgcaggccagcagcgccgcaagcatcccagccagtacatccccgctgccgccccgggcaagtcccggattgccggtggggttcacacacacccgcccatccgggcttgccaccacagtgcgtgcccccttcagcaccaccacagcattccacgccttggcataccgcagggcgatgcccgcccggtcgttggcaagcgctgctgccgaaaggccggtcaggcgcgccatctcaccggggtgcggggtgactaccaactcccctgccgggtgcgggaagggcttgccctctgccagcagctgcgcggcggcgttcaggccgtctgcgtccaacaccgcagcccccgcaaagccgggcagcagctgctgcaccagcgtgcgggtctcggtggcccgggcggcgctttgcgctgtgccgccaaggccggggcccagcagcagcacggtggccttctgccgccggagcagcggcacattctccggtgcaatgccgccctgtgcaccctccttacaggggcacaggcagcactccggcaggcgggtgacggcggcgccgaccaccggctctacgcttgcaagggtaacgatacccgccccggtgcgcagtgcaccctcggctgccagcagcgcagcgccccggtaaaaggcgctgcccgccactgccagcacactgccaaaggtgcccttatggctgtcccgggcacggcgcgggatgctttgccagacaaattcttcggtaatttccacagccatgggtgcacctccaatggaatgatttgaatgccctccgtttcactctgggcatttctagcagaataaaaattttaagattgtcggtttggaaaatctgcggattttccaaaccgactttttcacaagagaggaaattgggagggatagcatttacgcctgcccctgcacaagggcgcggatctgcttttccacgttctgcacttcctcgtggaacatccgggcggaaacgcgcagtgcgccgtgaccaaggataatgacctgctccataccgtccgaggtcgccacgcggacgcggcggctcttgccgatttcatgggtgacccgctcgatgaacatatcggcggtctcggcctccttggtatagaccacatggatgttgtggtactgctcgatggcgccggggctgccgggcacgcggtaggcatcgaacaccagaatgagcacgcatttctggtagccctgatagttgcacaggatgtccatcagcttgcggcgggcggcgtccaagctttccttcgccaacgcgttcagctcgtcccacgcaaagatgatgttgtagccgtccaccagcagatactccggggcaatttcccactgctctgcggcaaaatccgggcgttcggtcttttgcaccgggcggaacgccgccagcgggtcccgcttgatagggccataggtgcgctcaaagatcttgagcagttcggcgtcctcctccagcgtggcgcggtaggccatggcgcggcgctggggcgcagcctgcacctccgggcgggcgggctttgccttgccccagccgctttcaacgtgcatatggctgcgcacctcgctccacggcaccacaaagcccgcaccatgggcgcagaacacggaatctgcggggttgtccagatcatgctccggctggtagccggtttctgcaatgacctcctgtgcattgtgacaggggcggtaaccgtccagtgtcaggctcaaatgtcccctgccccgggtgtagctgaccacctccatggggtagctgcgcatggtggataccggcgcaaagccggtcagggtggcagtctccgcgccgctttccggcgggtcaaagctgccctccatgcgctggatatcgctcatggcgcggccgatgttctccaccggcacctccagccggaaggcataccacggctctagcagctggcttttggccagcatcagtccctgccgcacggcgcggtaggtagcctgccggaaatcgccgccctcggtgtgcttgaggtgcgctttgccggcaagcagggtgatttttacatcggtcagcggtgcgccggtcaaaacgccaaggtgctgcttttcttccagatgggtcaacaccagacgctgccagtttttgtccagaacctcttcccggcagtcggcggcaaactgcatcccgctgccccggggcagcggctccagcagcaaatgcacctcggcatagtggcgcagcggctcgtaatgtcccacaccttccatgggctcggtgatggtctccttatacaaaatgccgcccggaccaaaggatacttccagcccgaaccgctccgccaacaggctgcgcagcacttccagctgtacctcacccatcagctgcacatgaatttcgcccaagctttcgttccacaccacatggagctggggttcttcctcctccagccggtgcagcttgcccagcgcggcgtgtacgtctgcgccctccggcagcagcacctgatagctgagcaccggttccagcaccggcacatcgctgtcccgctctgccccaagcccggcgccgggctttgcatgggtcaggccggtcacagcgcacacctgtcccgggccgatggcctcggtcagggtatactttgcgccggagtacagccgcagctggttcgctttttctgcccacggctcgccgtccgcttcgccggtaagcagcgcctttaccttcagctccccgccggtgacccgcagccatgtcaggcgggtgccctgctcgtcctgcgataccttgaacacccttgcaccaaaggcgtgcagcgccggagcggggcgggtgtagcggtccagcccctccagaagtgcatccaccccgtccagccgcagcgccgccccgaaccagcacggaaaaacgtgccgccgtgcaactgcggggataatgtctgcatcggtcagggttcccgcgtccagcattttttccatcagctgctcatcgcacagcgccagtgcctcgttacgggcggcaggttctgcgccaaaatccacaaaaccctcgccaaggcggtggttcagctggctgagtaactgttcccgggtcatgccgggcaggtccatcttgttcacgaatacaaaggtgggcacatggtagcgccgcaacagccgccacagcgtttcggtatggctttgcacgccgtccgttccgctgaccaccagcacggcgtaatccagcacctgcaaggtgcgctcagtctcggtggaaaaatccacatggccgggggtgtccagcagggtgatggcggtattgcccgccgtaagcagcgcctgcttggaaaagatggtgatgccgcgcgctttttccaggctgtcggtgtccagaaaggcatctccgtggtctacccgccccagcttgcggatagcaccggcgcggtagagcatggcctcggagagggtggtcttgccggagtccacatgggccagaatgcccagtacgatctgtttttgcgttgtttccatgcactgctcctataagccgttttataagcatcgcacccgcttataaaacggcttctaaaaataatttcctgtttattgtaacacgctttgcggggaaaagaaagttttcgggcgcaaatcccgcaggcaaaaagcagcaccggacagaaagtggtctgcccggtgcaattttcttaaaaaagatccagcatattgtccagatagattgcctcccgcacctgcagctggtattccggctttgtcatatagtaaagcagaaattccagcaccagtgcgctgccaagccccctgccctctatcttaaactgggaaaagcctgcgggcaggtaccgctgccggatgtcctccaccccaataaatccggggctgcgcatcgccttggaaaagcggtagcccccggcggcatccggggcggcgcaacggtggtccgggcagtcctcgcccagattctgacggctgactgtctcatagcagcgcttgcgctcggtgcagccgaaccagcagcactcgttgcacaaaaattccaccttcgccttttgctccggcggcagggtgcgcagctgctccaatgccgggttcagccggaaatccggcaccacataccggaactgcggctttgccaattcctgccgcagctccgcaaactccgtgagcaccttggtggtggaggacaccagatacaactccggccagcgctgttgcagatagtccgccagcaaatcagaatggacgatgacgccgtttggcacactgccgctttttgcaaactggtcacacagggcgttgcactgcgggtcggcaaggtgctcagcccgcagcagggagttactgaaggtcagccgcccggagatgccgtattcccgcagcagcgccagcacctcgtgcgcagctgccccgccgcaggaaatgcgtcccccgccccagatgcagcccgccggggcgccgtagatagagccaatggtgcaccactcgtaaaaatattcccggtgctcccggtacagcggcaaaaaacggcggtacagctcgtaaaactcgaacaggccgggcagatgataacaggcagctgcgggcttttccatagcggttcctttcctgcaaaaagggagctgctgcgtaaaaatgccgtgcagcggctcccctgttttatcgtatttgcttttgttacacggtagcgccgacctgaggggcaccaccggcaagctgctccgccgtaagcggctgggcttctgcgggggcgttcagccgctccttggccaccgccagcatcagcttgatgcggttttcctgattgacccgggtagcactggggtcgtagtcgatgggggtgatgttggcactggggtaaagcgcacggatcttgttcaccatgcccttgcccacgatatggttgggcaggcagccaaagggctgcgcacacacgatgttgccgtagccgccctgcaccagctcgatcatctcggcggtcagcagccagccctcgcccatttttgcgcccagcgagataacacccttgggcttttccaccagctccttgaaggggcccggcgcatagaacccggcgtccgtctctgccttgagcatgacgcgttccacgctgtccagccagttgaggaactggtcggtgcctacctttacagccagcttgccgccgtacagcacatgatcctcgcccatattgaaggcgcagtactgcacaaagcccatcagaccggggaagttcacctcgcagtcctgactttccagaaatttttgcaggtcattgttgcccagcgggctgtacttgacgtagatctcgcccacaacacccaccttgaccttgggcacccgggtgaccggaatggtggcaaattcctttgcgatgagcgggaaggtgtgcttcatttcccgggaagtaaagcctttaccggccagcaaggcacggcccagacgggcgatccagcgatccaccatgcggtcagcggcacccttttcgttctcgtagggggctacctgattgcgcagcgcacacagcatatcgccgtagaagatgcaggcgatgcacttgcgcgccagcgggagggtcatctggaagccgctgtccttttccagaccggaaaagttcaggcttgccaccgggatctgcgggtaaccggccttgaccagcgccttgcgcagcagatggatgtagttggaggcacggcagccgccgccggtctgggtgatcagcaaggcggtgtgctccagatcatacttgccgctgttcagcgcatccagaaactggccgatgaccagcagcgccgggtagcaggtatcgttgtggacatacttcagccccagctgtgccacggcactgccgcagttgcccagcagctcacacttatagccttcgcagcgcagtgcgtactccatgagccggaactgggtcacggccatgttggggatgaggatggtatgggtctttttcatctccggggtaaatttgggataatgatattccataggttcctcctatgttactctaaacaagatagtccccgcaaagacttcccccgccgggggaagcccttcagcctatcttttattctgacttttctgcggcggcctcgtcccgctcgtccagtgcggcaaacaggctgcgcagacggatgttcacggcaccgaggttcgtgatctcgtcgatcttcagctgggtgtacagcttgttgccccgctgcaaaatctcgcgggtctcgtcggtggtaatggcatccacgccgcagccgaaggacaccagctgcaccagatccatatccttctgggtggtgcagtacttggcggcagcgtacaggcggctgtggtaggtccactggttcagcacactggtggggaacttctgcacccggttggagatgctgtcctcggtgaccaccgcagccccgtggcgggtgatcaggtggtcgatgccatggttgacctccgggtctacatgatagggacggcctgccagcacaataatgcgcttgccctgacggcgcgcctcgtcgatgatctcgctgccctttacccggatcttagccatgtgtgcctcgtactccgcgtaggcagcatcggctgcggcctgcacctcccgctcggagatgccgccaaagtacttgggcagcacctcctttgccatcttgtgcacaaaatccttgggacggtggatgcccacataatcatagatgaactttttgccttccagctccgggcagttgcctgccagaacctccgggtagtaggccaccaccgggcaattataatggttgtcgcccaagccctcgtccacgttgtaggtcaggcaggggtagaagatggcgtccagctgcatctggctcagcgccttgatgtggccgtggctcagctttgccgggaagcaggcggtatcgctggggatggtagcctgtccggccagatacagcccgcgggtggacaccgggctggtgtgcaccgcaaaaccaaggctcgtccagaaggcgtaccagaagggcagcagctcgtagaagcccagacacagcgggatgccgatagaaccgcgcttgccgggcacaggcttgtagctggccagcagctgctgcttgtaggcgtacaggttcaggctgttgtcctcgctcttgccggtaacgggcttatcgcagcggttgccggagatgaacttgcggccatcggcaaaggtattgacggtcagctggcaatggttgccgcagccgccgcacttgacgctgaccacctgctgtgcaaacttttccagctcctgctcgtccatcatggcagaggtggtctggttgtttttatgactctggcgcaggccgtacaaagcagcgccgtaagcgcccatcagaccggcaatgtccggccgaatgacctccacgcccatctccttttcaaaggcacggagcacggcttcattataaaaggtaccgccctgcaccacgatcttgcggcccagctcttccgggctggaagcgcggatcaccttgtacagcgcgttcttgaccacgctgatggacaggcctgcggagatattctcaatgctggcaccgtccttctgcgcctgcttgaccgagctgttcatgaacacggtgcagcggctgcccaagtccaccgggcggtctgcgaacagacccagtgcggcaaacttcttgacgtcgtagcccagcgcctgcgcaaaggtctgcaaaaagctgccgcagccggaggagcaggcctcgttcaggaagatgttgctgatggcaccatcctcgatcttgaagcacttcatgtcctgcccgccgatgtcaatgatgaagtccacgtccggcataaagtacttggcagcggtaaaatgtgccaccgtttccaccagaccgtaatcacagcggaaagcgtttttcaccaattcctcgccgtagccggtggtggtgacgctggccacctgcagccccggatgctccttgtaaatcttgagcagctgctcccgaatcagaggcagcgggttgccaaggttgggctgatagttggtgtacaaaatctggctcttttcgtccaccaccaccagcttgacggtggtagaaccggagtcgatgccgatatgcaccggcccgcagtgggcactaaaagccacgcggggcacactgtgggacatgtgccgtgcgtggaaagcctcgtactcctccttgctggcgaacagcggcggctcactggcataggttgcggtggcggcgtacttgtccagcgcagcggccacctcggtgagcacaaactccttgtcggcatacaacgcagcgcccagcgccacatacagcagactattttccgggcagattccggtcacgttcagcgcttcgtcaaagctcttgcgcagcacggtactgaaggtgagcgggccgcccagatagaggatattacccttgatggggcgaccctgtgccagaccggcgatggtctggttgaccacggccttatagatgctggcggcgatatcctcggtgcgggcaccctgattgatcagcggctgcacgtcactttttgcaaacacgccgcagcgggaagcgatggtataggtacgctgcgcctgctcggcagccttgttcatttcctcggcgctcatcttcagcagagtggccatctggtcgatgaaagcaccggtgccgccggcacagctgccgttcatgcgcacctcggtgccgttggtcaaaaacaggatcttggcatcctcgccgcccagctcaatgacacaatcagtctttggcataaagcgcttgaccgccacgcgggtggagaatacctcctgcacaaagggcacaccgcagctgtcggctaagcccataccggcagagccggagatgctgagcagcgccttgcggccatgcagatgctcggcatcaatgcgccgcagcagctcctgcgccttttccagaatatgactataatgtcgttcgtatgtagaatacagcagttcatcatgctcgcccagcaccacgcacttgatggtggtgctaccgatgtcaagacctactctcaccttgtttttcctcctaaggacaaataaccggaacataacgccccggctgctatggcaaacaagccgtttgcggcaaagacccgcaacggcgttttttctttttagcttcccgcattgcgcatctacgtcattttcaaacagtacgcgttataaaaaacacagcaaatgcgcttttgcatacattattataatccaatcgcgggcggcattcaatccatgttgtctattttacacgaaaaaaatagtattttttgctcaaaaggctgaactttttgtgaacatgtgtcggttttcccgcaaaaaaagccgccgcacagcgctttgtgcagcggccttataccggcggaacgatttcgaatggctccgcatacgctttggctattttcagcggaagttcatctctacgccccacgcgtaaaaatgtttttggagcgttccgttttccttaccggttcacgaaattcagcaccagaaccagcagcagcatgtgcacggggtaaaaggcgtagcaggcatactggaaaggcttgctgtggtagccctgccgcccgcgatacagccagatgggcaccagtgccagcagcgccagcccctgctggcaaagctcaaagtccatgccgaagagctgaatagggtacatcagcccgcccagcagttccacgttgacccagtacagcgctgccagctgccccagcaggcaccaccacctgcgcccgtgaaaaaagtagaagatgaacacggtcagcacaccggcgccgtagtagtccaccatgcccagcgtacccagcaccgcgcctgccgccaccacaagggccgctaccagcaggtacaaccatgttttctgctttttgcgcaccgtttccatcaagtggatgcccagaatgcccagcagcagcgtccagatgacgttctggtgcaccgggtagaaccatgtgccgccgtacatcaaatcgaagggaatctccgaaagcagggcaaacagcagcagacgcagggtgtattttttcaggtcatgggtgtggaagtagccctccaccgccataaacgcaaagatgggaaacgccacccgcccggcacaggtcagccattcctgcgcgggcagcaaagtggcccacaggtggtccatcagcatcagcgccatggcaaggatatgaagcgccgctgcgctcaggtcaaagcgggtcgcggcagtggaatcgattggtttggttgacatgatcctacctcgtttttgtcgaaatttggtcgttctgtctggaatacgaacgagccccgcaaagaattgcagccccggccagatttttccaccgccggggctgcaggaatgctttattttttctgctgcgaatatcccagacacaaaaaggcggaaccaaggcagagccacaccaccgccgtggagtgattctcgccggtaacaagattcagcaccgcaacaagaaaaaacaacagtccactgagataaaacagattgcattttttcatagagcattcctccggttttggttttttcaccggctattttggatacggcaagcgcaggggcggctgtcattttactccgcgtgcaaaggggcgcagagcgcccacccggcacgcagaaagtgtgtgcccgcagcagtctgcggggcaaattcatgaagggtggcttgcctgcctgcccatggagacgtaagcgcaaaagcaggaatgcgggaaggagcaagggacggtttcggcgaaaaagcgtctggcggtggcggaaaagccgaacgcaagattttttcataatagctggctcgtaaggtgagccgtaccaaaacttccttgcggaaatgtgcagcgttatagttcatctgcacctgaaccggcagctgtgcacccggcgcttgccgcacccaaaatagccggtggaacgtttatttagttttggacgttttccagatagatctcaaaggcttcggcaaagctggcgttcacatcaaaggggacagtgtagtccaccttggaggtcacaaggcagaggtccagccggttggaggtttcgtctgcctgccggttcagtttgctcagcgccgcatggatgaccttgcggtcgtagttgatggtggtcacccgctttacatcgcagcagtaggagatctggttgccctcggcgttgaagcggtagccggtgcccccgccggagagcagctgctcagaactgcgcagatcgttcatccgcttgaaggtgcgggcaatgctctggcgcgcggcattcaggctgacctcgctgtccatatccatgtccagcgaatcctttgccttgcggatggcggcaaacaggcggcttttttcctccagcagatagagcatgaaccgggcaacgtcggtgatctgctctgcatattcggtctgtgccacgtccataacggtctcgtcctcggcctcgggcatcaccttatggcgcagataggtgttggccaccttggtcacgttggcatcgcaatccagaatgccctgcgcctcgtccagcagagactggagcttgttctggtagcggaatgcttccttcaggttcatagtcgttccctccatcttgttttttctgctttcagcttaccacagactgcccgcccgcgcaagccttccggtaaaacaggcaaaacgcccgccccggcatgaccgggacgggcgttttgcatttgctgtgacacttattgggataagagattggcattactcagccggccacgcgctcggtgcggcctgcctccagcatatagcgcaggaagccggtcacgtcggcggggtcggtcacggtgaggtcaaagcccttcttgggggcagtgtccatcatctgcagcatggagcgtgcggtagtgtcctttttcaggtcgcaggtcttgccgttgtccagatgcagcagcacgctgccgtggctggcagaaagctggcgcatgaaacgttccttatcaaaatactcgatacgaagcataggaatacctccttgataaaatggtttatgttacacttgccgtccggtcctctttggacaggcggcgggagaatagcggttttgcccggcggggaatgcttacacagcttgcgtcccggctgccttggtgctatactgagcttggaagctctgataggataataccacaaaacaatcgcaaattatagaacagaaccgcatagtatatgcaacaaaaccggcattgacaaaaaacattcaaagtattgcggaaaggatttggtgaatatggcatatcagacaagctgtgcctcttataccagcggccgggtggggctgtccagtgctactgccgtggtggccgatgccgccgggcgagagcagacccagcacggcagcccgctgttccctatcgcctgctacgccgaggatctttcctgtttttcggtggcgtggcactggcacgaggaatttgagttcattctggcggcgttggggcccattcatgtggatgtgaacaagacccggctgaccctgcagaccgggcagggggtgttcatcaactccggggcgctgcacgcggtagagcctgccgagggcagggcgctgctgcactccggcgtgttccagccccggcttgtcggcggcatggacaccgtattctggcaaaaactcatccgcccgctcttgcagcccggcacaccgcccttctttctgttggacgaggccgtgccatggcagcggcaggtgctgctctgcctgcgggaggcgtggaagggcgtggcggacgagccctttgactacgagaaccgggtgcgctaccaccttaccgctgccctgcggctgctcattacccaatgcgtcagcggcaaggtgaaggtatcggagcaggagcagatcgcctcggagcggatgaagcagatgctgcgctatgtagaggagcactacgccgaggagctgaccgtggaaaaactggccgactgcgttgccctgagcgaaagcgcctgtctgcgcagtttccggcagtttctgggcatcacacccatccagtacgtcaagcagttccgggtggaaaaagccgccgagctgctgcgctccacccggctcaagaccggcgaggtggggctggaatgcggcttttcggacgcgagctactttatcaagaccttccgggagatcaagcactgcacccctcgggagtaccgtatccgcttctgctgagcaaaaagtaaaaaatgccgggcagctgcaagctgcccggcattgcattataaaattcccccctgccagcgctccggcgggatgaccggctcggtgacaaaggcttcgggattcggggcaagaacatggcgggtgacccggaaaagccccccggcgtcgcacaaaatgcagcttgcatcgccaaatttcgtgttccgggctgcgccgcagtccagatacgcctgttccagcttgacgaaatcctccgagatgtgcggctgctgtgcgttgtagtggcggcgcatatagacggtgtgctgcgccccggcttcgtccaccacggtcatctgcatgggcttgtcggtcaggcggttcggcacgttcagcacctcctccacgctatggataaaggtgttgcgggcgtgggtgacccccagcagcagcaccttgccgtgagctgcccgcagccgatcgtagcagccgccgggagtgcagggggtgttggcgtccagctctccttccagatacgcagccgcccccttgccgtaagccgccatgctgtgggtggggtgtagcgagcgcaccaccccggggcgctgccggaacagctccggcagaatgcccacgcagcacgggctgtggcgtacatcgaacactcggttttcctcgttgatgaaccgccatgtgtgggtgggcagcagcagcaagccctccgcaaaaaactccatccatgcgtccagaaccgtgtctgcaccgccctccaccgggccgatggacttcatggaggaatggatcaggatggtctcgttccctgtcagccccatcgcggcaaggtcgtgcttgaggtcagcctttgtatatgccatgtcgtttctccttttcgggcattttgtctgtacccagtttaccgccttttgtgcggcaaagcaagccgatacacaaaaaggcacataccctgccgcgtctgcgagggtatgtgcctttttgcttttttcagtggtcagcggttactcgcccagcagttccttgcgcaccggtgcaacctgatcgttcaccagttccttcaaagccttctggaagtgccacatatcattgccgagaatgatcatgttgtagccgtctgcaatagcctgcttcaggttctcctgcgtgggaggcaccaccgggcccagaacgcccagacccttggcgcggcactttgccaccagcgtcttgtaggcctcgtggacctcctcgcccatggagtagccgatcttcagctgcttggaaacagcgtagtcgatgggtccgaagtttacggcatcaatgccgggcacgtcaaggatctcgtcgatgttgtcggtaaactcaaagtcctcgtccatagggatgaccagcgtatcccggttctgctgctcgatgtaggcgttccagtcaaagttgtggtaaccaaaaccggcagcacgcacgttggtctcgccgccgcggcggcccagcggtgcaaactttgcaccctccacgctgcggcgtgccatttcggccgtcttgcagtgggggatcacaacgccgtctgcgccccattccagcaccttgcggatggctacctcgttgtcgtctgccatgcgcaccagcaccgaaatatcatgcagctttgccgccatgatctgcttttcgaatgcttcatccagcatatagttggtgtgctccagatccagatagataaaatccagaccggacatggcaatgttttcgatcacgcaggtcgtgccggtaaagcacgccataccgaaaaccgggccctttttcatcttttccttcagagtcaattcttacaccttctctttttctcgggttcctattataaaccgcacccgctttgcagcgggtgcggctgcgtacaggcctatgttcagaaaatgctgtaacccagcagctgcggcagggcggtggtcagcgggccccacaggctgatagagatcagcacgatgacgttgcagatgacataaggtgcagcacccttgaagatctcgatgatgggcatacggttgatcttgttgcaggcgttcaggcacatgccaacgggaggcgtgaccagaccgatggcaaggccggtgatcatcatagcgccgaactgcagcggagagaagccgtactgctgcatgaccggcagcaggatgggagtcagcagtaggatggcggggctgacgtcgatgaaggtaccgatcagcaggatcagcacgtcaaagatcagtgcaatggcccatgcgggcaggttgagggacatgaagaatgcacccacggtctgcggcaccttctgcatggtgagcacccatgtgaagattgtggtaaagccgatgatgagcatgatggaggaggaagagatcagggtctttttcagtgcctcccagacgcccttccaggtcagctccttgtaaacgaagaagcccaccagaatggagtacagcacagcgacacctgcgctctcggaggcggtgcagacgccaaaggaaacgcagatgataatgaacaccggcatgatcagggcgggaatgccgctcagcaggctcttggcggcgcgctttgcgtcaaacttggcctttgccgggtgccagcccttctttgcgctgatgatgtacacgaggaccagctgagtcaggccgatcaggatgccgggcacggcacctgccatgaacagagcacccacggatgcgccggagatcatggagtaaacgatcatgggggtagagggcgggatgatcatgcccatggtggaggaagcaacggtgatacccgcagaggcctccggagggtagccctctttttccatggcggggatcaggatggagcccagagcagaggtatctgccacagaggaaccggagatgccgccgaagatcatggaggccacgatgttcacttcgcccagaccgccgcgcaccgggcgcagcagctccatgcagaagttgatgatgcgctgggtgataccgccggtattcatcagctcaccggccagcatgaacagcggcatggcgatcatcagctcgctgtaagcgccgttccacacgcgctggggcagcatggcgataaagttgggtgcgtagatcaggatatagctcacgcaggaagcgccgatcgcaaaggccagcggcacgcccagcgcagcaaagaagatcagcagcaccagaaggatgagcattgccataagtattttctctcctttcccttatgcatcttccttggtcagcgccttgttcttgggcgcaaagaaggaaatgtcggccttgtacagggtgatgatcttgatcacgacgcagatggcgcaaatgatgccgcaaaccggcatgatgccgtacatatacatcatggggatctccatgccctgactgatctgcttgcctgcaacgccaacgtacttgaagccctgataggtgaataccagatccacggccagtacgatgaggtagttgacgatggccagccagcgcttgcgggcgggcttgacaccgtcgtagatgatgtcgatcatgacgtgctcatccttaatgacgttgatgcccatgccccagaaggtggtaaaggcaaacagggtggtgttgaactccgccagctgcttccagctcagggagaagcagtagcgtgcaatgaccgtaaaaatgaccagcgcggcaagcagtgccatagcgacgatcccgatgaaaaagtacaggtcaaacagctttttcccgaattttttgagcgcttctattgtgctcagcccctttcctgtgatgttgtgggtggtttatcattgagaaagggcagcccgaaggctgcccccgtgcctcaataaaaacgatatacgcgcaagcggttatgcctttgcaacgatatcctgcatctccttcagctcgtctgcggagcagatgccctcgctgatgcacttgtcgtacacagactgcacagcctgctggaaggccttcagctcgtctgcggagggctcatacacctcgcagccgtagtccacgatagtctgctttgcagcgctggagttctggtcgatcagctggtcgttgtactcacccatagcggtagcgcactcggtgatggcatcgcggaactcctcgggcagagcgttccaccaagcggcgttcacatagaaggggtccggatggaactggtagttcacttcggtgaagtacttctgcacctcgtagaacttcatgccttccacgttgacccaagggttctcctgaccgtcggcaacgctggtcttgaggcccatgtacaggtcagagtacgggatggtggtggtggtagcgcccatggcctggaaggtcatgtcgatggtcttcatgccgttggtgcgcatcttcaggcccttcaggtctgccggagccttgatagggtgcttggagttggagaactgacggtagccgcctgcatcgcacaggttgatgatgacggtgccggtctcgccttctgcctcagcacacaccttctgtgccagctcgctctgcagcagagcggtgacctgtgcgcgggtgttggtcaggaagggcagggtgaacatcagcaggcgggggctgaagtcgaactggccgccgcgcataccctgaatggtacctgcgaccacctgctccagcatctccttctcggtgcccagctggccgttgccgtaaacctcgatcttcacatggccgttggtggcagcagccacatcctcggcaaacttttccatggagacaaagcgggggttgccctcgggctgtgcatgacccacggtcatggtaaagctgcccagagaggcaaacttgtcatcaccgccggctgcagagctggctgcaggtgctgcggtggtggtggaagaggcagaaccaccgcaggctgccattgcacctgctgcggccactgcgccggataccttcagaaagttgcgacgagagatctttttcatacgattgtcctccaacttgtgtcaggccgccgggaaactgcctcgtgcttgtctctttgccggtcaacctgtatacagcatttacttcgtgctgctatcgtaacaaaaaacacatatttccacaagagcaatattcactgaacttattgaggtttctttgtgcatttggcacaatattcaccttttttcagcatttattcaactttttttctggtgtttttatctaatataccagtttcatcactgtaagatccgtgttttgcccgattgcaagttcctgtatacaagaactgtcataaacttctattcaagcattgacattctgccgccggaacggtacaatgataataagcttatatttaccggataaatggagaacaactatggctacattacagcacactgatgagctctatcatattctcgaggacgagatctgcgcactgaagatcctgcccggggaagcgctgagcgaaaaccagctgtgcaagcggttcggcgtttcgcgcactcctatccgcagcgttttgcagcggctggagcagaaccgctttgtgcagatcattccctgcaagggcaccattgttaccgccatcgacaccggcgtggtggaccagctcatcttccagcgtgttgcggtggagggcatggtgttccgggactttgtgcagagctgctcgcccatggagatccttgcggtagaacacctttataatatgctgctggaagccgctgcggggcgcagcgacccggagaactttgatttcaaccacttcctcagctgcgaccttgccatgcacgagtactggttccacaagaccagcaaggagtacctttgggagcagatgacccgcccgcaggcagactattcccgctttatccgtctggacatcgtgggtgcacgcaacgtgtccagcgtcgtcagcgagcacgctgagatgctgcgcatcctgcgtgagaaggatctggacgccatcgagccgctgatgcgcacccacctgtacggcggtgtgagccgtatgggcagcaagatctactcggacgaataccgcggctacttcaagctgccggagaacaaaaaataaagaaggccgccgcacaggaaactgtgcagcggccttcttctggttgcgccagcaggagtcgaacctacgatgggggagtcaaagtcccctgccttaccgcttggcgatggcgcatcatgcaaaacagtatagcatattttccgctgttccacaagaggtgcgccgcatttttgcggctttttctgtgcgctgtctgccgcacttgcggcggtttgggtcggtttttgggctttgcggccgggaccctgcgttttccatatccttccatgtttttacgaaaggcaagttttgcgggatgcgtttttcaaaaaacacagtccgcagggggcacaagattcatattgcaaaggtgaaatttattttttcctgatttttcttattattttctcaaaagactgtattttttgttgcggttctggtacactggatgtgataaaaataagttgaagaaactacgccgatgtccgggctgtccccgggcggggcagtgtctccatctttgtgaaggaaagcgagggatctcatgaaaaaattcctgaaaacgctggtggtcgggctttgcctgttcacgctgctgtgctgcgcactgccggctgcatttgccgccgacaaaacttcagggagcaaaaaggaagagaacgtgtacgccattggtatggatgcccagggcggcatctgctccaccgtggtaacctacacgaacctgtccggcaaactggagagcacgcccgagcagcctaccatgacgggctacacctttgacggctggtacactgagccggtgggcggcagcaaggtgaccacctccaccgtgttcacctccgacgccaccatctacgcccactggactgccaaggtcggtacttctaccgtgccgcagcccaccacccagcctgccgccacccagtggcaaaagtatgtagggcctgcacttgtggccggtgccctgcttactaccctgctggtcgccaccatgttctgaacactgctgtaaacacaatgacaccattgaagaaagggatcttaccatgactacttctaccatgaaaatgcccgccagctattccgctatcgaagccgaggagatgacctatctggacggcggcgccagcaacgcttatcagtccttcctggacgttggcaaggtgttcaactacattgcccgcatcttctccggtgcaagctccatcatcaacaatgttaacgtcatctaccagtcctttgtatcgctgaacagcctgctgggcagcttcggcaagtaaaagcatcaccccaaagttcagatccgggagccgcgcttttttcgaaaagtgcggctcccgtttttcgtacacactgtaattcagtacattactgcgcagcacttcacgttccagaattgtgaacaactttttaagtttttggggggtcagtggccgttttttggacatttttaatatataaagcaaaaaaatgcgatattttttcagctttatctcttgattttgtatctgatttgttatattactgttacagtgggtgtgctagaataaggttgtttataaaatgcccttcagaccgcgtaaaaaatcgtggcggcaagcgttttttcaggtatttttgttaagtaatttcgtaatcttcgaaaaccttttcgttctttatgatttgggagtatgtacacaaatggcagatcgtgaactgcggcggatgcaccgcgctgaactgatagagatcatctatgcgctgaagcagagcgaggaccagctcaaggcgcagaacgccgcgcttaccgcgcagctgcaggaccggcagctacggctggaaagcgccggttccatcgcgcaggccgcgctggagctgaacaacgtgttcgccgccgcgcaggccgccgccgatgactatctgcactcggtgcaggccagtcttgcggacaccaacgccaccgccgccaataccctttcgcaggcgcgcagcgaggccaagcgcattctggagcaggcacaggcagacgccgacagcctgaaagcgcaggcgcagcaggaatgcgacgccatgaccgccgccgccgcgcaaaaacgcacccagaccgaggccgactgcaaggccatggtagagcgcgccgagcaggaggtgcagcagcgctggcaggcatttgaccacaaggccaacgagctgctggaccagtaccgcagcacagacggcctgccttcggaggaaacatgaaaaaacgcgatatccggttcgcttccatcccttccaccgaggaagtggccgcagaacgtgagcgtcttgcgtaccagagccgctaccagcgggtgctgcgcagtacgatctatattctggtggtggtggccgcagcagccgtgctgctggctacgctgtttctgccggtgcttcaggtctccggcgacagcatgtaccctacattaaatgataaagacattatcctgctggtaaaatccaaccacattgaaaacggcgagctgtgcgggttttactggcagaacaagctgctgctcaagcgcatcatcgggcagcccggtgatgtgatcgatatggacgtgaacggcgtagtctcggtaaacggcgtggcgctggacgaaccctatgtggacgcgctgaccgtgggcgaatgcgacatccggttcccctatcaggtgccggaaaaccgttacttcgtgctgggcgaccaccgtgccacctccatcgacagccgcagcagcgtgataggttgcgttgaaaaaagccagatcgtgggcagggttttcctgcggatatggcccttgtccagcttctcgttgatccattgaccccgggaggaggtatttcgttatgaacgacattcttaaaacgtacatggagcggttccgcgagaaccggcacaccctgcggcgctacaccgcatttgtgctggcacttgccatgatcaccaccctgttcgtcaactggcagctgcatggcgtgggcatctcgatgaccgcgcagtaccagtgcggcgaggaggagcacacccacaccgcggattgctacaccaaggtgctcacctgcggttacgaggaaggcgagcttgaaaatgcggacgaggtggccgccgctgctgccaccagccagcccaccgttgaggctgagcccgcgccgctggcactggagccgcagatcgagtttgtgccccacgagcacaccgaggactgctacaccgaggtgcagaccctgacctgcatggaggaagagcacgtccacggtgacgactgcttcgaccccgaggacggcaccctgatctgcgagaaatttgagcatacccacgatgaaaactgctataccaccgagtacgagctgacctgtggactggaagagggcgagcttgtggagcaagtggtggagcccacccagagcgccgagctggcggctatggctgtggccgagcctgtggcactggagccgacggtggacaccgtggagcccatctaccaccaccacactgacgcctgctacgaggaagtgcttacctgccccctgccggagcatcaccacaccgtagcctgcctgagcgacacctccgccgacgttgagacccccgaagagtggcaggccgccaacgccgaggccgtgatgaccggcaactgggacgaggacctgctcagcgtggcaaagacccagctgggctacgagcagagcgagaaaaacttcgagatcgaccccgcagacggcgtgaccctgcactactactcccgctacggccagtcttacggcaacccctacggcgagtgggacgtgatgttcctctcctactgcctgaagtacgccggtatcccccagagcgccatcccgcaggaggccagcgtgcttgccctgcgcagctccatgagcgacatggattggctgctggacggcgaggacggcagcgccgccaatgtgggcgacatcgttatttataataagtacgtcacccgcaccgtggctgtggacagcagcgccgatggtgcagcggacgatctggacgacctgttcagcatggacgctgagggtgagaacggcgcagagcttgaaacttccggcgcttctgcgctggataccgcccccgccgccgaggacgcccccgctgccgacagcgtgatcacccccgatctccccgacaccgccaacccggagcagcccgccgcaaagccggtggacagcaccggcacctctgcatccggcgcggacacccttatccccagcgtggcatcccccgctgccgagccgcagaccaccaccgtgactgacgctcagcccgtggagaccgtgggcatcgtgagcgaggcggacgagaacaccctgaccgtcatctccggcgacgtggacggcaaggtggctgaggtcaccctttccaacgccgaggttctggccgtggtggatgttgccgccgcccagtacgcagacgagatgctctcctctgccgttgacggcgcactgaaagcccccgatatgcttacgctggcgggtgagcccatgactgcaagcaccacggccacgttgaacgataactggatcaccggcactacgatcacgctcaacggcaacacttatacagtcaagggcactcccaccaccgatgcccctacactgcccgagggtgtttccgttaccgtcaatgacaatgtatccttgcattatggctttgacattcccgatgggagcgccaagggtgtaagcaccctgacctacaagctccccagccatcttattccgcttaaaaacactgcaagcggatttctgactaacggtcaaaacgaaaccattggtactattaccgtagacacaaacggtcttgctaccctcaactttaacaaaccgctgagcggacagaccagcggcacattttacgttgattgccgcgtaagcgaaacatcgaccccaactgaaaatcagatcagattccccggaaccagtcatactgttgagatcaaaaagcagacggacgttaaagttaaaaaagagatcgtaaagaacgccagcggctctgagtatacgctgcaagctgacggtacctataaggtgcactacaaagttaccgtaagcacgaaaaacggcagcggcgagacgatcgatctggtagataagatcaccgagatcaataatatttcggatgtcaagtatcaggatgtcaagctgtacaagaacggtagcactgatccgtacaacgattgcaaagtgactccgtttgaagaatacggtcgtcctgcaatcaagatcacaacaaaaaacgacggcgaactgcccgcactgaacgccggtcagtattatacgctggaatatgatcttgtgttcaagaaaaccaagcaggactggggtaatattaaaaataccgcttttgccaatggcgagagcaacggtaaagaaatcagtttccaaaacgagctgcaaaaatatggcagctatgacccaaaaacaaaagaaatcacttggacgatcgagatttaccccaacggcaacacgctggccgggcttgaattgaatgataccctgcaaaacggaatgaaaatgaccggcaaattcatcatcaaggacaaggacggcaaaaagcttgttaacgaacctaattttgaagcaggtaaagacaacttcacctacaccttcccgactgattctcccttcaacgacccgaatgcaaattccaagtatacagtaacctataccacaactgccccggctgactttgcaacgaaccccactgtaagcaacactgcaacgatcaaactcaatgggggcaagaagtgggaaggcacgggctctgccggctacaacaaaggcagcgaggtcgtcagcaaaacaactaaatctggtaataatgaatccaccctgaccacttccgatctggataccacaaccgggctctttacgctgccttggaagttggaagttcagctgcctgataatgaaagctctcccacggtcgagatcaatgatactatcatccagcccaaaaaaggcgaccattatgccgtcaagagcgagctggaaacagcgatccagaagaacttgctggtgtttgtgggagaaaattcctacggctacaacgacctgtcgaaggccggtcttaaccttacgatccattattacgcggaagaagattgtaaggataaggatgagtacactttcccgaacgataacgacacagttcgctctttcaagctgacgtttgaaaagaccgatacgttcgatctggataaggtcgtgatctcggagtactctaccaaggcatcgtatgataaaactgcactgaagcccggtgacaagattaaattccagaataagtgcgaaggcaagacgaccgccacgtactattttaccgtgcccgccgataacagcatggggcttgttaaaacgtcctctaatacggccggcggtacgaatagtgaaggctcttatagcgccaacgatgtcactgtagaaaaaggcaacggctatacagattttaatggcgtcaagcacgagggcacctatatctactaccagttggagcttactcccggcgacctgacaaaatggacagccaccaccgtcaccgataccctgcaggacggcctgacctatgttaaagactctgcctatgtagtagtgcgcagtggtgctgaagatatgtacaccactggcaatacatggcggcaatacatgtccgatgcacaatggtataaaaatggcgatgaacagtcccagattcaaggaaacctttcaaccgctgacttcttcagcgtccagcagaacggccagaagttgacatttggtcttactggtaatttcaagtatctgaaataccccgacccgcagcttgttgaccgcatcctgatccgttttgctgcaaaagtggatgatagcatctgggatcctacccagcaggtgcagaccgtatatttcagcaactctgcaaaatggggagagtatagctctaccaccaaaactgaggtcaagcatgaatcccagatcataagcaagaaaggacagtatgatgattctaccggctatgtacggtactctgttgtcatcaaccccgacaagctgaagcttggcaccgacaagatgatcgagctggtagacgatatgcaccccgatggcaacgaatcaaataccgccgcgctggtacgctctacggtcaagttgtacagctatgacccaaccgctcccgataagaagggcgcagagatcgccgacggcgtatatactgtggactataaggagacccaaaaaaatcagcgcaaccattatatccttaccgtcagcgtcccgaacggttatgcctatgttctggagtatgcttaccggaacacttctaacaccagctaccagatgaaaaataccgccgagctttgtggtaaaacgttcgaagcgactcctacaaaaacatatgctacaggtgccggaggtaccgctgattctgccggactgcatctgtataaggttgatagtcgcgatgcccgaaagttgctgcccggtgcaacgttcaagctggaatggtttgacatcgacagcggtacgtacaaggacgtccagactgtaacaactgacgcgaacggtgagatcgacctgaccttctctgcagctaccagttcaaagcccggtgaggacacaactggtgctgtgtaccgcccccacaattacctttacaagctgaccgaaaaacaggcaccggatggctaccgcacggatacagattgggcgcattacttcatctggacatctgattccacctcggatgacgttgcctacaaaaccgctgtcggcacttacaatgcaactaataccgaagtaaccaaagacaaggtcaacatctaccatggcagcgcttccattgatctggaagtgaccaacgaaagcaaccgtcttacctttgtaaaacagtggatcgacaaagacggcaaagccattcccaaagacgctagcagcctgccggataacatccagctggaactctggtgcaccccgaccaagggcgatacccccaacgccaaaatggttgacaccatcacgctgagtaagacggacagctggacttacaactacgcgatccctgaagcctataaagacaggtacttctacgtaaaggaagttgccaccaacaaaaattacacggtaagctacattggcaatgatggtgtgcagcatggtactattaccatcatcaacaccgagaccgattcctccggctacgagctcccctctaccggcggcaccggtacactcccgtacacagccgtgggcggcactatgatgctgaccgcgctggcatatagttttatccaccgcaagcgcagacacgaagggagggcagatgactaaactgcacttccctgccggacgcccggagcttaaaccccgcccgcccagcgcaaagtttacgcgatagaccgaacaaaaacgacacccctccccccccctgtgcaaaatgcagggggcggcaaggggcagaaaagaaaggggctttttccatgaaaaaagcaatgaagaaactcatggctgcactgctggcagttgctatggtttgcgccatggcgatcccggcgtttgcagctggtgaggatgccaccgctggtgccaccactggcgagggtaagatcaccattgataacgttattactggacaaacctatacgatctaccgtattctggatctggagtaccacgcagctaccaatgcttaccgttatacggcgaatgaagcttggaaagacttcattcgcaaccaaaccggtgacttgaagttagacgaaaataccggtgttgttacctggatcaatgacaataacaataataatggcactgctattcagaaatttgcaaacgatgccggtacatatgctaaggatcatgacgtccaagcagtgaagagcattaaagcggaaggcaaaatgggtgaacatagcactgctgacaatagcaccagcatcacctttgaaaatctgccccttggctggtatctggtggtttccaacctgaacaagggtgctctctgctccatcgataccaccgacccgaatgtagtaatcaaagagaagaacagcgattccacctttgataagcacattcttgagggtacagagttcaaaaccgctaataacgctggcattggcgatgtggtaaacttccagatcgacattgttgtgaatgatggtcagcccaaaggttatgttgtacatgataaaatgagcgaaggtctgaactttaacagcagtactgttaaagttttccttctccgtcattctagccctgacgattctggtcttttaacaactggctacacgttggttacaaatcctgacgatagttgcacctttgaagtaaagtttgatgatggcacgctgaaacccaatgatgcggtcaccattagttacactgcaactgttaacaataaggcagtaattgctggttctggcaataccaacgaagctcacctccagtataatgacaaaaccactgttacacacaccaccaccacctacgtctgggggatgggcgtgcgcaagtttgcaaacctcggcactggcaaagaggataccccgctggcagaggctgagttccagctgtacaagaaggacggcgaaacccagaagtacgcaatgttcatcgaaactggcgttaacaccagcatttacaagctgaccggctggactaccaacaaggctgacgccatcaaggtcaagacccccgctaatggtaacatcaagtttgagggtctggacgccggcacctactatctggaagagactaccgctcctacgggctataacaagctgaccgctcctattaccgttgtgattgaaagcactctgcctactaaaggtggcgccgcttcttacactgttaaggctaataacgttgaggcacccgagtacattgtgcgcgttgagaacaaggccggtactgagctgcccagcaccggcggcatcggcaccaccattttctacgttgtcggcggcggcctgatggttgctgcagcgatcctgctcattaccaaaaagcgcatggagaaccactaagctctccttttcccctgcacagagcggggctgtaaagccccctgctctgatcctgaaactataacgttagggagtagcccatgaaaaagaacaaaagcaccattatattgatcctcgtctttttcgtgggtctatccgtgatgttataccccactatcagcgattacgtcaaccagcgcaaccagtcccgcgcggtggcaagctacgcgcaggacgtggacaaaatgaccgatgcggattacagcgcctactttgacgccgccgatgcctttaacgcacaggtggccgccaacgaaaacgccctttaccgcccggatcagcttaccggctacaacgacacgctggatattaccggcaccggcattatgggttacatcaccatttccaaaatcggcgtggagctgcccatctaccacggcaccagcgacggcgtattgcagatcgccgcaggccacttggagggcaccagcctgccggtgggcggcgcgtccacccacgcggtcatttcggcgcaccgcggcctgcccagcgcaaagctgtttaccaacctcgaccagctggaagtaggtgatacctttaccatcaccgtgctggaccgggtgctcacctacgaggtggacaaaatttccattgtgctgcccaccgagaccgatgagttgaagatcgccgaaggcaaggactacgtcaccttgatgacctgcaccccctacggcatcaacacccatcgcctgctggtacgcggccgccgcgtggagaccccggatcagtacaagcacctccgcgttaccgccgaagcgcttaaaattgaacccattattgttgcgcccattatggcgctgcccatgctgctgatcttgctgatcggtatgctgatttctacacgcaaacccaagaaaacgagaggtgaagaacatgaaaagcattgatctgcgtcatcgtctggcggctgtgctgctggctatgtgccttgtggtatgctgcgccctgccggcgtttgccaccagtgccaacattgtgctggggcgtctgggctcgctccatgtccgtctgtacgacacccacaacgatgtgcccctgcgcggcggcgagcttaccctgtatcaggtggcctccgtcaaacgcaccaacggcaacctgtactttgactataccgacgattttacgggctgcggtgtcgtgctgggcgatctttccgacagcacgctggcagaccagctggtaaagtacctgcccgctgtgcccgccattgccgcccagcaggacgtgaacgaagagggctatgccaacattaccaagctgccgcagggtctgtacttggtcgtgcagaccgaggcctcccacggctacgaggccatcaagcccttccttgtgtccattccgctgcccgatggcgacaactggatctacgatgtggacgccacccccaaggtaggcgctaccatcccggaaacgccggacacccccgacaccccggatgtgcccgatacgcccgacacaccggacacccccgatctcccggagcagccggataacccggatacgccggtgagccccggcacaccggataacccggtaagtcccggcaccccggacaacccggtaagccccgaaaatccggataacccggtctccccttccaaccccgataagcctgttctgccccagaccggccagttgaactggcccgtgccggtgctggcctgcagcggcgtgctgctgtttgccgcaggctgggtgctgaaccgtcagggcaaaaaggaaaactgactttgcactcctttcttttcggcacagcgtggcgttgtgtaccgaatttgctcccccgcaagggggagcattttttgtgccctttcccctgccgggcgcagcacgattttgaatgcgctccgcgttgctctgcgcataatcagcggaaaatatatttttaaatttgcaattctggaaaatctgcggattttccagaattgccttttcacgggtggggtttgggcacgaaccctctcaggcatctcgctttgctcgatgccagctcccccgaagggggagcttttggggtggagctggcgaacgcagtgagcctgagggggtacacgcaaaagagccgctgtactttttgtacagcggctcttgttttacgcaatctgtattatgtttttactgctgctgggcggcctttttggcctccagtgccagaatggcgtcgcggcggctcaggttgatgcggccctgctggtcgatgtcggtcaccttgaccacgatggcatcgcccacggcaaccacgtcctctacccgctccacgcgcttggtgtccagcttggagatgtgcacaaggccttccttgcccggggcgatctccacaaaagcaccaaagttcatcaggcgggtcaccttgcccttgtagatggcaccgatctcgggatcctccacaatggtcttgatggtaaagatggcgcgctttgcgtcctcctgattcacggcggagacgaacacatggccgtcctcctgcacgtcgatcttgcagttgcaggtggcgcagatgtcctgaatgaccttaccgcccttaccgatcacgtccttgatcttgtcggtggggatcatcatgctgaacatcttgggtgcccagcggctcagctcctgacggggctcggcgatcacgggcttgatgatctcgtccagaatatacaggcggcccttgcggcacttctcgaaggcctcggcaatgatgtcgtaggtcaggccgtcgatcttgatgtccatctggatggcggtgatgcccttgcgggtgccgccaaccttaaagtccatatcgccgtggaagtcctccacgccctgaatgtccagcatggtcatccagcgctcgccctcggtgatcagaccgcaggagataccggcaaccggagccttgatgggcacgcctgcgtccatcagtgccagcgtagagccgcagatggaagcctgagaggtggagccgttagagctgagcacctcggacacgcagcggatggtgtaggggaactcctccaaggagggcagcaccggcaccagagcacgctcggccaatgcgccgtggccgatctcgcggcggccggggctgcgcggtgcgcgtgcctcgcccacagagtacggcgggaagttgtagtggtggatatagcgcttggtctgctcgtcggtcaggtcgtccatcagctggttgtccttggtgccgcccagcgtgcaggtggtaagcacctgcgtctggccacgggtgaacataccggagccgtgcacgcggggcagaatgcccacctctgcggccagcgggcggatctcgttgatgccgcggccgtccacgcgcttgccctcatccagcagccagcggcgcaccacgaacttctgcattttgtagcttaccagatccagatcggcggcggacaggtcggggtattcctcggcaatcttgtccatgatgggcagcagggctgcgtcacgcacgttcttgtcgtcggtgtccatggcagccttgaagtcgtccaggtacttgttctggatggcgtggaacacatccatgtccagacccaccacctggaagtcgatcttcggcttgccgcgctcggccacgatcttgttgatgaactcgatgatcttcttgatctcaacgtgtgcggtcttgatggcggtcagcattgtgtcctcgtccacctcgttggcgccggcctcgatcatcacgatcttatccatagtggcggcaacggtcagagcaaggtcgctcaccttgcgctgctcctgcgtggggttcagcacgatctcgccgtcaaccaagcccacctgcacgccgccgatggggccgttccaagggatatcggacacggcggtcaccagagaagcgccgatcataccggcgatctcggggctgcagtccgggtcaaggctcatgacggtcatggtgatgcacacgtcgttgcgcatctccttggggaacagcgggcgcatggggcggtccaccacgcggctggtcaggatagcgcgctcaccggggcggccctcacggcgcataaagctgccgggaatgcggcctgcggcgtagagcttttcctcgtactccacgttcagcgggaagaaatccacgccctcgcggggcttggggctcatgaccacgttgcacatcacgcaggtctcgccgtagcggatcagtgcgctggcattggacaggccacacatcttgcccatttcaaccttgaacgggcggccggccagcatggtttcgtagaccttgaagttgtcaaaggtctctttgcgggaaccaaattcgattgccattgtttctgcctccttgtttttcggatcgttctatccaaaaagccgtggcgcgcgcattatagcaataaatccagcgtccctgcccgcaggcacaggcgttcgatttactgctgcaatacgctgccaccgctattttgtgcgcatgggatacatggagttatacataaagcaaagggcaggtacctttgcggtacctgccctccgttaaaattacttacgcagacccagagttgcgatcagagcacggtaacgctcgatgtccttcttctggagataagccagcagattgcggcgacggccaaccatcttcagcagaccgcggcggctgtggtgatcgttagggttcttcttcaggtgctcgttcagctcgttgatgtgagcggtcagcagagcgacctgaacctcgggggagccagtgtccttctcggtcagagcgactttggccataacttcctgcttattcataatacagtacctctttcaagtaatttatctgcctatggcacagcggcgggaaacggttctcccaaaagcgggcatactcccagccccgtaccacggtaacagatacagtataccagattgcccggcagattgcaagaagatttttgtccgcaagccttaattttttacaatgccgccccagtacagctgcacctccggcagcttctttttgcgcagcagaaacacggtggggatcaggtacaccgccaccgaaagcagccgcgaggcatcgtagccgcttacgctctcggccacgctggtggtgccgtacagcccgccgatgagcatggcggcaatgtccatggcgctgtgcaggaacaccgtcacccacagattgccggtgcggaagtagatggcggccaacatcacgcccagcgaggctgcaaacacacactgcatcagcacgccaaaggcttccgagccgagcagattgctcaggtgcgccgcgccgaacagcacgccggacacaaggcaggccttccacaccccggcacgggcggtgccgtagcgctccagcagggtctgggcaatgatgccacggaacaccagctcctcagccacgcccacaaggatcatgttcagcataaaggtcaggatgcggggcagcggcagcagcggcgtgtccgggcggtcaaaggccagcgtcccaacggtcgtatacccgatgaagaacagcgggtacatgcccaccagcattccgttcagaaagccgcagccgcgccggtgcaacagatcaagtctgccggtgcgggccagcagcaaaagcgccaccgccagccccacagcctcctgcacagaacccagcagatagccatccatggtgtcaaaatccgcgcctgccgctgccagcccgatggtagccagcaggctgaacaagaccatgctgccaaggaacagcacctcagacaggatacaataaagaatggggtgcgcagtgcgcagccgtttgagcataagtacagccctccctatcaatgatagccctattctaccacgattctccccaaagcgatagggcgaaaataaagtgtgctgccgggagatcggggatctgtgaacggcttgcagcatctttttacagaaagttcatgtaaaaacgggctaaaatagccttgcagatttgacgtgtctgccgctttggtgtatcatatatttgtattgttatgcgcgattccgggcgcatcacagcccgatttttaagatttatgaggtgtgacctatgtcccttgttgaaaaactttttggcagcttctctgaccgggagctgaaaaaggtgaaccccatcaccaaacaggtgctggcactggagcccaagtatcaggccatgtccgatgccgacttacaggcgcagactgccgccttcaaacagcagctgaccgagggcaaaacgctggacgacatcctgccggatgcctttgccgtctgccgcgaggctgcatggcgcgtgctgggcatgaagcacttcccggtacaggtgaccggcggcattgccctgcaccgcggcgatattgccgagatgcagaccggtgagggcaagacccttgtggctaccctgcccgcctatctgaacgccctgaccggcgaaggggtgcacatcgttaccgtcaacgactatctggccaagcgcgacagcgagtggatgggcaagctctaccgctggctggggctgaccgtgggtctgatcgtgcagggcatggacggcgacgcccgccgggccgcctacaatgccgatatcacctacggcaccaacaatgagttcggctttgactacctgcgcgacaacatggtgacctacaaggccaacatggtgcagcgcggccacgcctacgccatcgtggacgaggtagactccatcctgatcgatgaagcccgcacccccttgatcatctccggccgcggcgaggactcctccagcctgtatacgcaggtggaccgctttgtgcgcaccctgcgcaagagcgtggtggtggaactggaagataaggtctccaccgatgagcaggccgatggcgattacgttgtggacgaaaagcacaagacctgtaccctgaccgccgccggtatcaaaaaggccgaagcctattttaaggtggagaaccttgccgccgccgagaacatgacccttgcccaccacatcgatcaggctatcaaggcctacggcgtgatgcagcgggatatcgactatgtggtcaaggacggtcaggtcatcatcgtggacgagttcaccggacgtctgatgatcggccgccggtacaacgagggtctgcatcaggccatcgaggccaaggagggtgtgaagattgccgccgagagcaagacgctggccaccatcaccttccagaactacttccgtatgtacaaaaagctgtccggtatgaccggtaccgcccgcaccgaagccaccgagttcaccgagatctacggcctgaacatcgtcagcgtgcccaccaaccgcccggtgcagcgcaaggactacccggacgccatctacaagaccgtggagggcaagtaccgcgccgtcatcgagcaggtaatggagtgccacaagaacggtcagcctgtgctggtgggtactgtcagcgtggaaaagagcgagatcctcgccaaaatgttacagcgccatacccgggatttcaacgtgctgaacgccaagaaccacgagcgcgaagccgagatcgttgcgcaggccggtaaaaagggtgccatcaccatcgccaccaacatggcaggccgtggtaccgatatcatgctgggcggcaacgccgagttcatggcaaaggctcagatgcgcaaggagcacttctgcgagaacctgctcaaccccgacaccccgcaggatgccgacccggcagccgtggagctgctgctgaccgaagccaacggccacggtgagaccaccgatgccaacattctggccgcacgtcagcgctttgaccagctatacgcccagtacaagcccgccattgacgcagaggccgacgaggtgcgcgccgcaggcggcctgttcatcattggcaccgagcggcacgagagccgccgtatcgacaaccagctgcgcggccgtgccggccgtcagggtgacccgggcgcttcccgcttctacctgagccttgaggacgacctgatgcgtctgtttggcggcgaccgggtatccagcctgatgaacaccctgaagatcgacgaggacacccccatcgagaaccgcatgatcaccaacacgctggaaagcgctcagaaaaagctggaaggccgcaacttcgagatccgtaaaaacgtgctgaagtacgatgacgtgatgaaccagcagcgcgagatcatctacgggcagcgccgcaaggtgctggacggcgaggacatcagcaccgagatgcacaagatgctgcgggagaacatcgattccagctgcgcccagttcctttccggcgatgtgaaggacgagtgggattttggcgccctgcgccgccactatcagggctggctgaccaccgatgccgacttccactataccgtagccgactttgataacctttcccagcagggcattgcagatatgctgtacgaccgcgggatgcagatcctgcaggccaaggaggtgcgctacggtgcacccgtcatgcgcgaactggagcgcatctgcctgctcaagtgcgtagaccgccagtggatggaccacatcgacaacatggaccagctgcggcagggcatcgcgctgcgcggctacggccagaaggacccggtggtggaataccgcatcgagggctttgatatgttcgaccagatggtggattccatccgggagtccagcgtcaagatgctgcttaccatcgagctgcgcgccgccggttccgcacccaagcgggagcaggtggcaaagcccaccggcgagggttttgtgcccggcaacggtgcacccggcgtcaagggcagccccaagggccagccggtgcgtgtggtcaaaattggccgcaacgacccttgcccctgcggcagcggcctgaagttcaaaaagtgcacctgtgcccagtaccacccgactggcaataacggcggggaagaataaccgtaaggcgaagccctcccgtcatggttctgctgtggccgagagggctttccgcataaattcagagggagttgattttacaatgatcgcaccggaaaaactgttggaagccgccaaggcgctggagccccagctgcaggaatggcggcgcacactgcaccgtcacccggaggtgggctttgacctgccccaaaccaaggcactggtcaaaaaggcgctgactgagatgggctacaccccgcaggactgcggcaagtgcggcgtggtggcgcttgcaggcggcaagcgccccggcaaggtgatcctgctgcggggcgacatggacgcgctgcccctgcaggaggaatccggcgaggagttttcctctgagctgcccggcaagatgcatggctgcggccacgatatgcacaccgccatggtgctgggtgcagccaagctgctcaaggagcacgaggacgagatcgaaggcacggtaaagctggagttccagcccgcagaggagatctttcagggctcgttggatatgataaacagcggcctgctggagaaccccaaggtggacgcagcggtcatgttccatgtgctggccggaatgcccctgcccgccggtatggtgctggtgccgggcggcggcatcaccatggccagctgcgagcagtatcacatcgttgtgcacggcaaaggcggccacggctccatgcccaacgcctgcatcgaccccatcaccgcagcggcgcacatccacattgccctgcaggagatcaacagccgcgagctggaccccgcaggctttggcgtgttcaccaccggccggttcgaggcaggcaaggcttccaacgtcatcccggatactgccgatatgtggggcaccatccgcaccgtggacccggagcagaaggtcagtgcccttatccaccagcgcatgaccgaaattgcgcagggcgtggccaccgcctaccgctgcaccgccgaggtggagttcagcgattactgcccctgcatggtggtggacaccccgctggcgggcaacgccctgacctatatgaccgagttgctgggcaagggcgctatggatatgaccccgctcaccggtggcaagcccggcggcggcagcgaggacttcgcctttgtcagccacgaggtacccaccgtgagtatgttcttagctgccggcaacgctaaagagggctacacctacggccagcaccaccccaaggtgcgctttgatgacagcatcctgtaccgcggcacggcggcctacacctatatggcgctgcgctggctggcagagcaccagtaaaatcgccccacagaacgccgggcaggaggaaaagcatgaagcaggagctgatggatgccattcaggaaacgccagtcattgcggccgtcaaggacgatgccgggctttgcaatgcgctgaccaacgagaacatccgggtggtattcgtattatacggagatatctgcaatattgcctccattgtgcgccgcatccacgaagccgggcgctttgccgcggtgcatgtagaccttatcgcagggcttgccggtaaggaggtggcggtggactttatccgcagcaccaccgaggccgacggcatcatctccacccggcagtccttcatccgccgcgccaaggagcttggtctggccgccattctgcgggtattcctgctggattccattgcactggaaagcttggataagattcctccaaatctgccggactgtctggacctgctgcccggcaccatgcccaagatcctgcgccgggtgtgcgctaccgccaaagtgccggtgctcgccggcggccttattgctgataaagaggacgtgatggccgcgctggaagccggaatcactgccatttccaccaccaatcaggcggtatgggatatgtgacccgcattctgcgcaaaagcaaccggtgttttttgtaagggtttcacaaaaagtgcaaaacaccttgctttttgtgcagggacagggtatcataagagtaaacaagtgctgtttgtttcaggagatatgagcgaaacggacaagggcagttgcctttgtttcggttcgctctttttttgtaccatcaacagctgcccagctcccgacgggccaaggcagaatggacaggaggaaaagaacaatgtatgatgtagcaatcatcggctgtggcgtcatcggtgccgctgccgcctacgcactgtcgcgctacgacaacaaggtggtcattcttgaggccgagaacgatgtggcagactgcaccaccaaggccaacagcgccattctccacgcaggctacgaccccgcccccggcacccgcatggcacggctgaacgtgcgcggcgtggcgctggcaaaggagatctgcgcaaagctggatgtctcctataagcagtgcggctcgctggtgctggcactggacgagaaggaactgccccatttgcagcatctgttcgagaacggcaccgcaaacggcgtgcccgacatgaagattctttcccgggaagagacccttgccatggagccgaacctttctgaaaaggtctgcggtgcactgtgggcacccagcgccgccatcgtgaacccgtgggagtatgcactggccatgaccgaggtggcggtacgcaacggcgtggagctgcgccgcagctgcaaagtgaccaatgccgaagccatcgagggcggctaccgcctgaccgtgcccggcggcacggtggagacccgctgcgtcatcaacgctgccggtatctgggcagacaaagtacactccatggtggagcccgccaacttccacatcattcccacccggggcgagtactatctgctggacaagagcgagggcacccgcgtgagccacgtcatcttccagtgccccaacgagctgggcaagggcgttctggtggcacccactgtgcacggcaacctgctcgtcggccccaacgcagagcctgtgaagggcaacgacacctcctgcaccagcagcggtctggaatttgtcaaggccactgcccagcgcagtgtgcccagtatcaacttcggcgagtccatccgcagctttgcaggcgtgcgcgccaatctggacgtggacgactttatcattggcgaggagccggaggcacccggctggatcgatctggccggcatgaagagccccggcctgtccgccgccccggcggttgcggaggaagctgttgccatcctgcagcagcgcggtgtgctgggcgcagaaaaggccgactacaaggacggccgccgccacatccgcttcaaggagctttccgcagaggaaaaggccgcactggtcaaggagcagcccgcttacggccgcgtgatctgccgctgcgagaccatcactgagggcgagatcctagcagccctccacagcgaggtgcctgccaacaccatcgacggcgtcaagcgccgcgccggtgcaggcatgggtcggtgccagggtggcttctgcggcccccgcgtgctggagctgatcagccgcgaactgggcatagaccccttggacatcctgcaggacaagaacggctcgaacgttctgctcagcgaaacgaaggtaggaggaaagaacaatggttgatctggtcattattggcggcggccctgcgggccttgctgctgcctgcaaggcatgggaaagcggtctgcgcgacatccttattctggagcgcgacaaggaactgggcggcattctgaaccagtgcatccacaacggctttggtttgcaccgctttggctttggcgagcaactcaccggcccggagtatgccgggcgctttattgagatgctcaagggcaccggcgtgaaggtgcagctggacaccatggttctggaagtgaccccggataaaaaggtgcactgtgtttccaaggagtatggctaccagatcatcgaagccaagagcatcatactgggcatgggctgccgcgagcgcacccgcggtgccattggtaccccgggcacccgccctgccggtgtgtacaccgccggtgccgcacagcgctatgtgaacatggaaggctatctggtgggcaagcgggtgctgatcctcggcagcggcgacatcggcctgatcatggcacgccgcatgacccttgagggtgcaaaggtgctggcctgcgtagaggtgatgccctactccggcggcctgacccgcaacatcgtgcagtgcctgaacgacttcgacattcccctgtacctctcccacaccatcgtggatattcagggcaaggaccgcgtggaaaaggccatcgtggctgagatcggccctgaccgcaagcccatccccggcaccgagatggagtttgatgtggacaccattctgctgagcgtgggtctgatccccgagaacgagttgaccaaacaggccggcatcgagatggacccccgtaccaagggcgccatcgtgtacgaaaacatggagaccagcatccccggcgtgtttgcctgcggcaacgtggtgcaggtgcatgatctggtggactttgtttccggcgagagcgagctggccggcgcagccgctgccaactatatccagaacggccccgtggccgaggggcgtgtgctgaccgtgaagcccggcgcagaccttggctacaccctgccgcagcgcatccgtctggaaggcgtggaaaagagcaccaacgtttccttccgcgtccgccgcatctgcggcaagagcaccatccttgtcaagagcggtgatacggtgatcgcacgcttcaagcgcgaccgccttgcccccggcgagatggaacacattgccctgcccagagtgctgctggacagagcccccatggacgaagtgaccattgagatcgaggaggcatgagcgatatgaaagaagtaatttgcacctgctgcccgcagggctgccatctgcaggtggatgaggccaacgactataaagtgactggtaacggctgccccaacggcattgcctacggcaaggaagagctgacccaccccacacgcatcatcaccagcaccgtgcgcgccgagggctgcctgcactcccgctgcccggtcaagacttccaagcctgtgcccaagggacagatggccgaggtagtcgcagcgctggacagcgtggtgctgcacgctcccatccatgtgggcgatgtggtgctgcaaaatgtctgcggcaccggggctgacattgtgacctgccgcgatatggcataagcactcccctttttacacaaataagcaaagcagccgctgcatcttaccgtgcagcggctgctttgcttgtggggaaagcccctgttttcaaatgattctttccgctgaatatgaccggaacgcagtgcaggccattcgttttctcaacctttcagcggcatgatgctctccggggcggcacacagatactggggcggccccggggcggcggcagaaaggctggttttgcccaccttccaccacagctgcgccgtaccctccggcgaggtgcagatgaggttccagtcaaaggggttttcactggtggagaccgcctttaccgggatggcgttgggcgcatccgcagcgcagggcgtaaagtcgtgggcacggatgcccacagcggtgcagcctgtcggaacgggcagtgccagccgcagggggacgccccagccgtccagacggacggtgcggctgtccagcggagtgcagggcaaaatgttcttgcaaccggtcagccgcgcggcggcgatgctctgcgggtcggcaaacacctcttttgttctaccggcacgcagcacctgcccctcgttcagcacgatcatttctttgcaaaggcggtaggcctcgtcccggttgtgggtcaccagcagagcggtgcccgcaaagtttgccagcaggctgcctacctcgccctctacctcttcccgcaggtaactgtccagcgcgctgaagggctcgtccagcatcaggatgcggggcttgcccaccagaatgcgtgccagcgcggcgcgctgctgctgcccgccggaaagctgggcgggatagcgcttggcaagcgtctccagccgcatggcacgcagcatttcggcgcaggcagcgcggcgggcggcggggtctttttctgccttcagaccgcagcggatattctgttctacggtcatattggggaacaacgcatagttctggaacagcagccccacgccccgctgctgcggcggcaggtcgatgtgctgcgcactgtcaaacagcacccgcccgtccagcacgatgcgtccgcgatccggctttaaaatgcctgcaatgcaccgcaatgtcatgcttttgccgcagccggaagcgcccagcagggcggtggaggtgttgccggcggtaaaggcagcacggagggtgaagccgtccagctttttttcaatgttgacttcaaggctcatttccggccacccgctttctgttttttctccagcaggttcacagccagcagcaccaccgccgagatagcgatatccaccagcacccaccgcatggcacccagttcatcgttggtgcgccacagctggtagaccgtggtggcaatggtggcggtcttgccgggggtgtagcccgcgatcatgctggtagcgccgtattcgcccagtgcccgggcaaaagccagcaccgtgcccgccagaatgccctgacggcaggcgggcatccgcacccgccagaagatccatggatcggactgtcccagcgtctgcgccgaccacgccagcgtttcgtcaaagctttcaaatgcgccgcgcgcggtgcggtacatcagcggaaaagccaccacgatggaggcaaagatggcgctgtaccagttcatgaccagctttaccccaaaatgctgcatgaaaaagatgcccagcggccgctttgcgccgaagagcagcagcagaaagtagcccaccaccgtaggcggcaacaccatgggcagggtgagcagcacatccagcacacccttgatcacccggggcagccgggcaatataataggccgcaaaaatgccaagaaagaacaccgccgcgcagctgatcaaagcaatgcgcaggctgttccacaacggataccagtccatgcctgctcctttatacggcgctgaagcccacaccctcgaatacggtcatggccttgtcggtctgcaagtaggccaaaaactccttggcagcctcggcgttgggggcggccttcagtacggcggcggggtagatgacctggccgcacatttccttggtagcctcgtccacgggggtcagaccggcactgtacgcatcggtgcagtaaacgacaccggcatccacgctgccctcggtgacctgcgtggtcacctccttgacgttggagccgtaggtaatcacgcccgcagccgccagtgcagcttcgtccagctggtagtaggcaaggatcttctgggtgtactggcctacgggcacatcgctgttgcccatgcagaacaggatatcctgtgccttcaggtgctcggccagtgcgtcaaaactgtcaatgcccttgtcgctgccctccggcacgcagagcaccaccttgttttccagcaggttcacgcggctgtcggcatccacaaagtcaaggccgtccttgttcacatcggctgaagcggtgatgtccagctggttcatctgcttctgaccggcagagatgaacagatcgcaatccgcgccctcctggatctgggtcttgagggtgccggaagagtcgaagttgaaccggaaggtcacctccgggtgctctgccgtgtagctctcaccaatcgcattcagtgtctcggtgagggaggcggcggcaaacacgatcaactccacgctctggctagcctccggggaagcggcggcagaggaagccacggacgatgctgcgctggaagcagcaccgccgcaggcggtgagggcagcggctgcaccggccataccggcagcggtcagaaaactccggcgggaaatgcgatggttgttcatctctgtttctccttacttcaagtgaaaaaatagtatatttctacgccctgtcaaggaaagcagggcaggaacccttacttgcgggcgcactcgccgtccagacccgcggcgatgcgtaccccgtgctccaagctgggcaggatgtactcgaggttctcctgcaccgccttggggctgcccggcaggttgacgatcagggtcttgccgcgcaacacgctgacgccgcggctcagcatcccgcgcggggtgatgctcaggctgtgatagcgcatagcttcggcaatgccgggggcgttgcggtcggcaatggcgcaggtggcctccggggtgatgtcccggggggagaagccggtgccgcctgtggtgagcacaaggttcacctgacggccgtctgccatgcggatgagctgcgctttcagtgccttggcttcgtccggcaggatcatggtctcctccaccacatagcctgcggcggtgagcatttgggcaatcagcgggccgcttttatcctcccgctcgccgcggctgcctttatcggaaagggtgatgacggcggcacgcaggggcgggttttccagtgcgggcagcagggtcacctcgtcccctacatggatctcgccgccggtgagcacccgggcgaacacgccctcgtggggcatgatgcactcgccggtctgctgcttgataacgcaatcgttgtggcattctttgccgatctgggtcatttccagcaccacatccccgatggcaaaccggctggtcaccggcagattgcggaaatcgaagccctcgatgaccagattttcgccgaaggcaccgtagtccacccagatcttcttgcggaacgcctcgattttttcggcgctgagcatactgacctgacggtgccagttgccgccgtgggcgtcctccacgatgccccattccggggtcaaaacggcgctgggcacctcggtttttacggtgccccgcttggggctggtacagattgccagaagcttacccatagttatttatcctccaatgcgatacatcccgcgggtagcgggcatggaactgtcgttaaaatggtgttcccggggctttgcccagatggtctcccggatggcggccagcagctgtgcgtcgtccgcgccgctgcgcagcagggcgcgcaggtcgcacccggtctcgctggcaaggcaggggcgcaaaaaaccctgactggtcagccgtacccggttgcaggaagcgcagaacttgccgtgcaccgctgcaataaagccgatgctgccctgccagcccggcacggtgtagtacaccgccgggccgtcgcccaaggcgtgctcctgcgcagtggaaaggggcgcaagctccggccagcgccgggcaaaccgcgcccgcagctccgggccggagatgcagggcatggcagcgccgtagccgatgggcatcatctcgatgaaccgcacctgcagggcgttgtcctttgccagcgcggcaagcgtttccagttcgccctcattgacgcccgcctgcggcacgcagttcagcttgaccggcaggccgctttccagcgccgcctgcaagcccgcctgcacggcggcaaaatcgtcccgggcggtgatctgccggaacacctccgggcgcagggtgtccagactgatgttcacgctgtccagcccggcgtccagcaatgcagacagctgctctgccagcagcatagcgttagtggtcagggtgacccggcggatgcccggggtcgctttaagtcctgccaccagctgcgccacgttcttgcgcaccagcggctcgccgccggtcacccgcacggtgtcgatgccgcactgggcaaacagcgcagccaagcgcagaaattcttcgtaggtcagcacggcctcccgctccagcttttccacgccgtccggcatgcagtagcggcagcgcaggttgcacaggtcggtcaccgacaagcgcagataatggatctcgcgctggtaacgatcaaacatagccgccctccgcccggatgtagtggccgctcttgccgccggtcttttccaccagatggatctcgcccagctccatgcccttatccacggccttgcacatatcatagatggtcagcagcgcggtggaaacgccggtcagcgcttccatctccacgccggtcacgccgctggtcttgacggtgcacagggcttctaccgcctgccgttcgggcagcagacggaactcgatgcccgccttggtcaggggcagcggatggcacagggggatcagctcactggtgcgcttggtggccatgatgcctgcaatgcgtgccacgcccagcacatcgccctttttcacggtgccgctctgcacggcggcaaaggcctcggcgttcatggtaataatgccgtgtgcagtagcttcccgggcggtgacgggctttgcgctcacatccaccatcacggcgttgccggcggcatcaaaatgtgtcagattattttcgttcataaatctattttaactcccgcagttttcaacgtatttcgaaactttggtggaatgactttcttagcagtgtccaaagccgcagttcggccagtggcacacctcgcagttcaggcacaggccgccctcgcccaagcgggcgatatcctcggcggtgatgaggtcatccgccagcagacggggcagcagcaggtcaaaaatggtacgcttggcgtacatcacgcagccgggcaggccgcacaccggcacaccgtccagatagctgacaaggaacatggctcccggcagcaccggcgcgccgtaggtaatgatgtccgccccggtgttcttgatggccagcggggtgcggtcatcggggtccacgctcatgccgccggtggtgaagatcagctcgcaccctgcggccttggcctccagaatggcggcagtgatcccggcggggtcatcatcgcagaccttgtgaaaaaccatctcgcagccgtagaccgccagcttgctttgcaggatgggggtaaatttatcctcgatgcgtcccttgaacacctcgctgccggtggtgatgatgcccaccttcttggcctgcatgggcagcacgttcaggataggctctgccccggcagcggcctgcatggcgtccatcttctcctgctcgatgaccagcgggatgatgcgggtaccggccagcttctgcccctttttcaccggaaggtcgccgtggatggtggcgatcatcatctgcggggtgctgttcacagccatcagcgccttgcggttgatcttcaaaagaccgtcacagtccgcgatcagctcgatcttgccttctttcggcgcagttccgtggatatttttgcccgcagcggccttgtacagcagggcggctgcttcgtcctcatggaggatgccggggtgcttttcccagacgtagaggttttccttgccgatggaaagcagcacagggatgtcctcgggctggatgacgtgccccttgcggaagcgggcatccttgtactcgcccgggatgatctgggtgatatcatggcagagcacctgccctgcagcgtcaacagtacggatcagtttcatgatggcattctccttacagcgcaggcatctgggcttcgatccagtctgccagtgccggaatatcgttcaggtcaaaatctgcgccggggatatcccccaccaccgccagcggctggaaggagacgggcgcatccgaaatggcgctgcgcaccacctcgatcttcggccagccgctggacttgaacccctccagcagcacaaggtcgtagccgtgacgctcgaacagggcaagcaggtcctgctcggtcaggcggaattcctcggccagcaggtagcgcgtgccggagtagaccgccacgccctcggcaccggcttcccgcagacggtagctgtcggtgccgggcacgtccggggtaaaatcgtggccgtcgtgcttgatgactcctacctttagcccacggctgcgcagcacgggcagcagtttttccagcagagtggtcttaccgctgttgtgcaccccactgacggccagcaccgccgggcgcttgagcgcctgcgtttcggccagtgcctgtttttgttcactgtacaaagcaaagcacctccacttctgtaccgggttctaccggcccgctgccggcggggatctccaccagacagttgcagcccatcatggcggacagcgcaccggaggagtgcgcctcggtgttgcccgcgccgggcagggtcaccttgccgccgcaggcagtcgcccgcaggtagcggttgcccttgctgggtttggaaaagccattggtcagggtgcagacggcgcgggcggggatgcagctctcctcccgccgcccggcggcgcgcagcagcgcggggatagcgtactgctccagcgtagcggcggcggcaaaggggttgccggacaggcagaataccagcttgccgcccagcgttgccgccagcatggggctgccgggcttctgggctacgccctctaccagcagctgtgcgcccagcttttccagcacaaagggcaggtagtccttctgccctacggagacgccgccgctggtgatgacggcatcgcagcgggtcagcagctcctgcattttaccggtgatgacctccgggtcatcggagcactgctgccgctccacggcaaagcccagctgacgcagccgggctgcgctctggatgccgttggcatcgtaaattttaccgggtgcccacggtgcgccgggttccagcagttcactgccggtggaaaggatgcccacagtcagcgggcggcagacggctacttcggcgtagccctgcccggccagcacacccagatgggcgggggtgagcaccgtcccggcaggcgcgatgaccgcaccggcggctacatcttccccccggaacactacgttttgcagcggttttacggcagcatagagctgtacggtctcttcgccgctgtcggtcagttcctgcatcaaaacgcagtccgcgccctccggcaggggagctccggtcatgatgcgggcagcgcaccctgcgggcagcgccgcagccggagcatcgcccgcgtaaagcttcatcaccaccggcagggtgaccggggtctcccggcttgcaccggcagtatccgcgctgtgcagggcgtagccatccagcgggctgcggtcaaaggggggctggtccatccgggcgcagaggtcggcggcagcaatgcgcccgcaggcggcttccagcgggatggtctccggggacggagaaggcagaagcgctgccgcgtccagcacgctgcgcagcgccttgacgggggagcagaaaggctggttcattataacttcctccatagacccgccgctctccccttctgctatggctcagacagggacaccggcgggggtattcttttttcaaaaaaggcaggtgaaaaagaagcggagacgtcttgaccggaaaatcaaaacgcctccgcagaatatccccacaaaaccggctgcggcagtttgcagtctgctacgccggtggcagcctttggctatgcgccgcccttgcagcggcagcacacagccaaaaagcacctgtgaagatgggaggagttctttttttcaaattgcagcgtttcttctgcgggaaggcggtggggtttcccccgccacccttgaatgcccgcccttgcgggtgcagcattgcggcgcggtgtcctgctctttgtgagagtttagacacctttgctcaaagaagctcttataccctgattcaattgtagtttatggtttaatcgcagaaatcgtccacgtcgctgatagccttggcgtagcggcgggtgaggtgcttggtggaaaagaggaaccgctcgttctggttgttggtcagctcctcgatatcggcataggcggggttctcctgcatggccttccatgtctgctcgatgacctccggcgcaaggccgtagggagagcgctggaagtacttgagcggagtggcgctggggtagatgcgggcgttgaaccgcaccatctcggcgaacatcacacacagatccttgtcctcgatgagctgcgcgatcatggcgtagttatcgctcatgttggcattggaatagtagtaggtgtcctttgcacccgcgcgggtgacgatatcggtgcactgggggtctgcgggcatctgcgccagcagctcgtcggcgttttccacttcctccagcagcaaagcgtggggggtaatcagcgcagccgcagagcgggcgcggatgtaaccggccagctcctgtgcaggggtcagctccggcagctccggggcggtcttggtgggctgatccgcaaagggatcgttttccgcttccggttcaccggccagaaaatccagcagttccggctttgcagcatcgggctgcgcagcttcggcggcttcgggtgcggcctcggcggcctgctttgcggcaagctcggcggtctcccgctccactgcagcgatcacatcctcgccggtcttggcggcgctgccgtcaaaggtgctgccggtttccttcaggcggcgggcagtctcgcttgcggcgtcaatgtcgaacacctctgccttgggctttttcttggcggccagctctgccttttgcagttccagaacggcctgttccgggtctacgctgccatccaccgtggtggtgtagccgggtttacgtctgccaaacaacatgacggtctttcctctttctatgggatttattcagctgctgcggtgttctgggcgtagatgccgcgcttttccagatcgtcggccatgtcagccagatcatacttctccagcgtctcgcgggtgggcacaccggtggtgcggtcccagccaaagacgtcgtagaacagatcctttgccttctccatgtcggcgcggtccagcttggtggtgccttcctcaaatgccttgaagtcgggatccttatcgaacacccaatcgcagatggcatcgtgctcctgacgcaggtttgcgctgccgcagttctgctggaagctgatggcggtcatcgcgcgcagcatctgggtgatgcgcgcgccgtcctcctgcagaccggcctgggtataggtctcgccggtaacagcagtcataaagtctgcctgcaggtccagatcgccgtggtagtcgcgctccttggagggagactgggtcatgggccacatccagttgcacagggtagcggagtcgtggaagttcttatcgttgacgcagtaggcagccagctttgccttgttctcgttgatgggagtgtaggccttggccttatcgtagcagccctcgccgaagaagtcctccatgaccttcttagtcacctcgtagggtgcgccggaaccggtctcgcagacgatctcgtggatcatgcagtcacggttgtagacgaggttgtacagcataccaacctgccatgcctcagcagggccgtggtggttggggaagccgttgtagatcaggttggagttggtcgcgccatcgtcgcggtccagccagctcttgggcaggccgaacttttccatcatggccagcgtgcccttggcaatgacggacaggtcgccctcgccgtaagccatgcggcggatcagctcgacctcccagcggggatcgccggccttctcccactcccaaggcagagagtcgtactcggcctcgctgatgtacttggtggcttcctcgcggggcatccgcaggatccaaagcaggtcgcggttcaggttgccgtagttgtcccacagacccatgtcgtccacagcatgagaccatgccagattgatgaccatggtgccgtcgccctcgtacttgaagtcgtgcacgccgtccgggtagacgcgggtgccgtacagcacgggcatacaggtgttggagttgtgggtgggcagatcgtaatctgccagcggatctacatcatactcggtgtagcagcggatggggcaggaggagcagccgccgttcttcacggtgtactcggcagcgggagcgccgaagtcgaagtagcccttgaagcagcgcagagccaccttgttgatatcgttgtagggctgctcgccggtatccacggggccgccgggagcctttttccacatacggccgggcgcgccggaccagcggttcttgccggaggtggcgctgtactctgcccagctctggggctgtgcgggcacgttgtggttgttgttgccgccgatcaggttgcccatcatgtagttggacagctccagcaccttcttggggtcagcgaccttgacgctgccggtgccgcggatggccagacccttcagcttcttgttgcccatggcagcgcccagaccggcaccgccggagttgccgaagctggtgttcagggtggagtagtccaccagattctcaccggcagggccgatggaagcagtctcgaactcgcggccgttctgctctaccatccacttgttggcagcaaaggtgcccttgccccagatctcggttgcgtcctccagagagaccgcgccgtcctcaatgcgcaggtagacgggcttctcagagatgccgctgaccacgatgccatcgtaaccggcatacttcagcatggagccgatgtggccgcccatgtgtgcgtcaatgatggagtgacccttagaccaggtggagcggaaggtcacgttcatacggccggagcagggcacgcctgcgccggtcagggggccgacaccaaagatgaccagagccttctcgtcataggggtccagctccatgggagcttcctcatacataatgcggtaggccatgcccataccgccgatatacttatggtacttttcgtcatcctgcgtggtgatctcgccggtggtcaggttgacgcgcaggatcttgcctgcccagccataactttcagccattgtagttcctccttacagatccaagtatgcagcctgtgctgcgctggtaacggcatcccaatccacgatggacagagcgccggacgggcagcctgccacgcaggcaccgcaggcgatgcacttggaggacttgccggtctcggggttgacggtgggcatatgccacgggcaggcatcatggcaggcaccgcagccgatgcacttgtcggtatccactacgcggatgccgcggctgtcggtggtgatggccttctgcgggcaggcattgccgcaggcggggtcctcacactggcggcaggtgtccgggaagtagacaaagcagttatcggtgccggacagcaggccgttgcctgcgccgtccagattcagacggcgctggatcttgacgcggctgatgtaagaggagcacacgccatcgttggtcagggtgcagttgatctcgcagcgctggcagccggtgcacaggtctgcgttgaccaccagcaggccctgcggcagtgcccaagtggccactgcgccggaatccacctgctgctgagagcagccgaacagggacagcatggaagcggacagggtgagccctgcaaggctcttgcccgagatcttcatgaattgacggcgagtcatgtcagccgtcaggaaatcagtttttgccataggttccattcctccgttgaggtcactctgcgcagagtaccccggtcacatagaaatacgagttgttgacgatggtcgtcacagccgaagaggtgatggtcgcgccggaaagggcgtccacctcggtcaggtctgcgctgacggcaccggacgcattgccggtggtggtcaggctggcctgctccagacgcgccttggactgctcctctgccgagagatccgcaaaggggattgccatcggctcgccgtccagtgcgctcttgctgagcatggctgcgtacagcttgcgccgtgccacggcctctgcgctggaatccagcggcggagccagctcatcgcccagtgcctcgcccttcaaagccgagaaggtaagccccgcagcatacatcttgcgggtagcctcggcctcgggagaggtatcgaaggtgcgccactgtgcggggtcaaaatccccggcagcagcgggctgctcctccgccgcaccggcagcggcataggcggcaccggtaacggggtccgttacggtgtagcttttgcccgccagcgtgaagggagctgcgccctgatactgggacgtgaactccgggttgacgcactggccgccaaggctttccgtttcgtcctgagagaggatctctactgcggaaacattgccctcggcgtcaatggtcacggcagcctgcacatcgctctggaagcccttctgagagccctccacgcggtagctgccatcgtcgagctgatacactgcgctgatgccgtaggcggctgcatccgcctccgacaccggcagcagggtaccggcaaccgtggtgcgtgcgctttgcaaggtggtcagaccgaccgccaaggcgatggtcgcaacgcccatggctgcatagcccggcagccgcttgcgccacagcggtacgggcgcaaacgggttggttgcctgcttcatgttatcacctgcctgttttttattttgccgggtaaccccggacagcaattgaggccgctctggctgctgcaacagcggagcggtctcttcgataatatattaacatgcgtgcgcggagtatgtcaacagaaacagacaggcttttccgttttgtaactattgtttttgtaatatttgcttaaactttagggaatttgcgtccgcacaccagctgcaggccgtattccgcagcaagttctgcggattgcacggtgggcatgcttttgcttaccagcaccggcaccccggcgcggatggccttgcgcaccatatccagcggcacccggccgctggtgtacagcacacattctgccagcggcagccctgccagcaccgcgcagcccaccgccttatccagcgcgttgtgccgccccagatcctcacaggcaaaaacaatttcccctttgtgcagcacaaagcagctgtgcaccgcccgggtggcgcggtacagcggcagcccggcgtgcatggcggcggtcaggcgctccacccattccgactgcaaggccagccccggcacagggcgcaggggctgcagttccaccgggctgcccagcgcgatattatcggtgcagcagctggccacctcctgcgcggcggcgcggcgggtaggcagcgggtggcgcagatatacctgcacctttgcgccctcggcgcagacggcgatctgctccacctcgtccgcagacgcgatccatccttcggtgagcagccgccccaaggccagctgcggcagcagcgccggggtgcataccacccggaaggcgggctgctcgttgacataaatggcggcggcgtgctctgccggtatggtggcttcggtgccgtccggcaggcgcaggctggcaaaggccgtctgcgcgccaaagcggtcggtgatctgcaaagagggtgtactgcgtttttccataaagtttccttatattataaatgcaatgctgtgtgtcagacggacagtatcaacataccggttctgtgtcaaaaagtcaagagctatcttgccgtaaaaacacaacgccggacagcccgcagactgtccggcattgcgatcaaaacgtcagatttacagtttgccctctcaggcatcgctctcagaacaccgccgggacgatccgctgggcatccacatccacgataccgtaggtgttcagccgcagcttcgggatgaccggcaggcttacaaaagcaagggtcataaaagcgtcgatgtcctccgagatgccgtgggctttcagtgccgccttgagcgcctgcagcttttcctccacggattcggcgctctcggtgctcataagccctgccaccggcagcggcagctcccctaccacctgtccgttcagtgcaaaggcaaggccgcccttatttttgcgcaccgtgttgcccgccagcaccatgtcggcatcgttggtgcccgccacgatgaggttgtgggagtcgtgggcaatgctggaagccaccgcgccgcattgcaggccgtagttgcccaaaaagcccaagcccacatggccggaacggtgatgccgctcgaacaccgccagcttgacgattttctgcgccacgtccacgccgggcgctgtgcccggatgctggcagaacggaacgattttttcagtggtcagcagggcgtgcggggtcagacagatcactcgctgccgggtgccggtctgcttcagctgcaattgctccggggtgatctcatccatgttgaaggaatcgaacacccgcgcaaagcgtgccttgtccacagtaagggcggcggggtgcagcattctgccctgctgcgccaccagtttgccctttttatacacctgctccaccgtgaactgttccagatccgacagcacgatcaaatcggcggtatagcccggggctaccgcgccgctgtgcgcaagaccgaagtactgacacgggacaagggtgcccatccgcactgccaccaccgggtctaccccggcggcaatggccttgcggatgatatagtcgatatgcccgccctgcaacaggtctccggggtgcttatcgtcggtcaccagcatacagcggctgcaatagggctcccggaacaggggcagcaggctttccatgttctgggctgcggtaccctcccgcaccatgatgtattgcccgcgccgcagcttttccatggcttcatggatgtccgagcactcatggtcggactgcaccccggcggcgatataggcgttcagctcctccccgctgaggaagggggcgtgcccgtcgatgcgtttacccgcagcggtgcagtcacagatcttttgcaggatcttttcgtccgcgcgcactgtgccgtaggagttcatcagttcagccagccccagtacccggggctgctgatagtaggggcgcagctgctccgcttccagcaccgcgccggactcgtccagcccggtggcaggcacgcaggagggcagcatgaagtagaccgaaagcgccagatcttttgtagtctccagcataaagtccagccctgccgtaccggctacattggagatctcgtgcgggtcggtgaccaccgccgtggtgccgtggggcagcaccgcctgttcaaaggccgggccgcagagcatggagctttcaatgtggatgtgcccatccacaagccccgggcagacatacttgccctgcaagtccagctcggtctcgccggtatagtgtcccacgccaaggatgaccccctgacggatggctacatcggcctgctcaatctcgtttgtgaacacgttgatgacccgggcatttttcagcaccagctctgcccgcacgtcaccctttgctgtcaggatctgctgcttcaaggtttccattttcataagggcccccttgtcctgttaaaaagcctgcgttctgctgccggaaaatctgttttctttcatttacatggcgatccagccaaaggcatttgccaccgagcttgccagaatgatggctgcaaaaatggggcacagccagcggatcataaaattgaacacaggcttgcggcggaagcgctgaccgtcctgctccacctcctgtgcgatctgctccacgccgatgacgcgggacaccagcaggcaggtggcaatggctgcaataggcatcatgaccgagttggtcaaaaagtcgaagaagtccaagaactgcatcccgaacacggtcaccccggccagcgggccgtagcccaatgccgacaggctgcccagcgccaccataatggcaccgatgagcacggtggagcgggtgcggtcccagcccagctcgtcctcaaaggtggagacagcgctctcggtcagggcgatggagctggtaatggcagcaaacagcaccagcacaaagaacagcacacccacagcggtgcccagacccatgctggcaaacaccttggggatggtgatgaacatcagcgcaggaccggcctgcagggtgtccgggtcgccgccggagaaggcgaacaccgccgggatgatcatcagacccgccatgatggcaatggcggtatcaaacacctccacgttctcggtggactcctcgatggagacgtccttcttcatataagagccgaaggtgaccagaatgcccatggcaatggacagagaatagaacatctgccccatggcggtgaccacggtcatccaggagaagtttttggggttgggcaccagaaaatacttcacacccgccagtgcaccgggacgagtgaccgagtagcccgcaatgaccagcgacagcaccaccagcaccggcatcatcaccttggagacgcgctccacgccgttgcgcacaccggcaaagataatgcccagcgtgaacaggctgaacagcaaaaaggctagttctgcctgcaagccgttggtgataaaggcggagaagtagccgtccactgccagattgctgccgcggccgcacagatactcggccagataatggatgacccagccgccgatgaccgaataatacggcacgatcaaaatggggatgatagcgttgatccaaccaccgaaccggatgcccttgcccttaccgaagtgggcgtaggcgctgaccgggcttttgtgggtcatgcgtcccagtgcagtctcggccacgatcatggtataaccgaatgtaactgccagcagaatgtataccagcaggaaaatgccgccgccgtatttggctgccagatacgggaagcgccagatgttgcccagacccaccgaagcgcctgcggccgacagcacgaacccgatcttaccggagaacgcgctgcgcttgtgttgttgttccatgttttaaatcctcttttcctatccgctataaaaattaagcaaaacaagtgtaccacatctgcggacaagtagcaagcaacagtacgaaatgccgcttgcacagcggcctttgggaacgtaggacgattggaaatatcctccgcttacgctctggatattttcagcggaatgattatttttatttcgcgtttgtcgcgctctgcggagcgctccaaacgcattttcaccaaaagggttataaaggcaaaatgcagtttccaatcacgacccccagctgtgaaaaagtggctcagaaacgcccgcaggcgtttctgagccacaaatcaaacaaagcttatttccttaaacaatggccaaagcgcacgcggcggccattctaaatcgtccggctgtatccttacagcttatggtacttgcggtcctcttcctcgtagacggggtcgcaggtcaggtacatccccagacggttcagggtgctgctgtccacgctggaaagcagcacggtggagtgtacatcacagcccttgaggttgggcagctggtgcatggctgctgcggcaagctcgctggaagcggcagagctggacagggcgatcaggatctcgtcggtgtgcaggcgggggttcttgccgcccagatagttggtcttgagggtctggatgggctcaatggcagttgcgctgaccaaatctgtctcctgcgggatgcccgccagatacttgagcgcattgatcagggcgcttgcggtagcacccagcagcgggccggtcttgccggtgatcacggtgccgtcgctcagctcaatggcagcagccggtgcgccgccggtggcttcgctgcgggcgtgcgcctgcttttccacctctcgtgcacccatggtcagcccggcctgattcatcagcagctccagcttatagcgctcgctctccttggcggtgccggtgatcttctgctggcacaggcacttgtagtaccggcgcacgatctccttgcgggaagcttcgcagcagactgcatcatccacgatgcagttgccagccatgttcacgcccatatccgtgggggacttataggggctctggcctgcgatcaactcgaacatcgcattcaccaccgggaagatctcgatgtcgcggttgtagttcacggtggtcacgccgtaggcttccagatggaaggggtcgatcatgttcacatcgttcaggtcggcggtggcggcctcgtaagccagattgaccgggtgcttcaggggaatgttccagatggggaaggtctcgaacttggcgtaaccggccttgacgccgcgcttatattcatggtacagctgggacaggcagaccgccatttttccgctgccggggccgggcgcggtgatgaccaccagcgggcgctcggtctcaatgtactcgttgcggccgtagccctcgtcgctgacgatgcgtgccacgtcgttggggtagccggggatcttgtagtggcggaaggtgcggatgcccagactgttcagccgcttttcaaaggcttccacctcggcggcggcggtgtacttggtcacgcacacactgcccacatacagccccatctcctggaaagcgtcgatgagacgcagcacgtccagatcgtaggtgatgccgtagtcgccgcgcaccttgctgctgatgatgtcctcggcgctgatgacgatgacgatctcggcctgctccttgagctgcaaaagcatctgcagcttggagtccggctgaaagccgggcagcacgcgggaagcgtggtaatcgtcgaacagcttgccgccgaattccagatacagcttattgtcaaacttcttgatgcgctcgcggatatgctcagactgcatcgcaagatatttgtcgttgtcaaatcctattttcatcgttcgtttcctctctggtggcccggcacaccatacccgggctttaaaatcacgaatataagtataccacagcccggggtggggtgcaatgcaaaacaaagcgctgaacgcaattccggcaggataggccgttttgggcggtatattgtcctgttttttgtgaaaatggtgcctgcgcaaaacgcaaaggggactgccgcggtgtgcggcagtcccctttgctcttatgaagaactatccgtatggagaagagaatgacttgttactttgcctcggcgggctgggtctttttgacaaggctcaggatcactgcgcccagcacactgcccacagccagcgccacacagtacagcacggcgtgatccaccaccgggaacacgaagatgccgccgtggggtgcgcgcagtgcgcagccgaaggtcatggacagcgcaccggcgaccgcagaaccgacaacgcagctgggcaggacgcgcagcgggtcggctgctgcataggggatagcgccctcagacacgaagcacaggcccatgacgtagttcacaatgccgttgcggcgttcgtccaacgtccacttgcgggggcagaaggtggtggacagggcaatagcgatgggaggcaccatgccacccaccatgacggcggccatcacctcgtagttgccggaggcaagggctgcggtgccaaagacgtaggctgccttgttgaccgggccgcccatatccacgctcatcataccggccacgatggcgcccagcagcaccttggagctgccgcccagtgcgttcagccagtcggtcatggcggtgttgatcatgcccataaccgggttcacggcgcacatcatcgcacctacgatgagaatgccgcccagcgggtaaatgagcatgggccggataccgttcaggctggcgggcagcttttcggtgatctttttaaggaactgcacgatgtagcccgctgcaaaaccggccagcagcgctgcaaggaagccgccggagatgccggtggtgctgcctgcggcaaggtcggtgaagtttgtgccgttcatagccagcacgccgccggcaaagcctacggccaagcccgggcggtcggcgatggacatggcgatgaagcctgccagaatgggcagcatatagccgaaggctgcgccgcccaccgtcttgaagaaggcggcaacgggggtgttcatgccgaagtttgcggggttgatgctgtaatcatccagcaggaaggccagcgcgatcataatgccgccgcctaccacgaagggcagcatatgggaaacgccgttcatcaggttcttgtacaggctgcggccaaagctgtccttaccggcggtgtcgtcctcggctgctgcgccgccctcggcgtggaacacaggcacctcgccgtgggcaatcttcttgatgagctcctccggcttatggatgccgtcgtccacgcgggtgaacagcaccggtttgccgtcgaaacgggcggtgtccacctttttttccgctgctacgataataccatcgcaggcggcgatctcggcgcgggtcaggatattctttgcgccgtccgagccgttggtctccaccttggtgggcagacccagcttgtcaccggccttggtcagcgcctcggcggccatgtaggtgtgggcaatgccgttgacgcaggcggtcacggccagaatgcggtagccgtcctgcgggatggcctgctgggtaaagctctctgcaccaaactgtgcttcttcctgtgcgtcgatgcactccaagaactccttgggggtcttggcagctttcagcttttccacaaagtcctcgttcatcagcatctgcatcatgcgggccagcatatccacatgcaggctgccgttttccggtgcggcaatggcaaacagcaggtcggtggtgccgtcatcttcggcgttgtactgcaccggggtgctcagccgcagggcggccagactgggacgggtgaccacattggtcttggcatggggcacggtgatgccgttatccacataggtagagccctcggcctcgcgggcatagagcgcctttttgtaggcctccttgtcggtgatgttgccatgggtagcctgcagctccaccagacggctcaggatctgctcctgcgtctgcagcgcttcgtccagcgcaatggactgtgcggtaaataactcggtaatgcgcataaacgttcctcctttgttccttttatcctatcaaagctgcgccagcagctcgtcgatcttttcctttgtggcaagcccaaggctgaaagccgttgcgctgccgcaggccgtgcccagacgcagcgcctgcgcgtagctgcgactttgcagatacccggccacaaaaccggccaccatgctgtcgcctgcgcccacgctgttgaccaccttgcccttggggcaaccgatgcggtgcacctgtccctgctcgtccagcagcagcgcaccgtccccggccatgcttaccagcacgttgcgcgcgcccttttcctgcaaagtacgggcagctgccacgatctcggcgtcagtagtcagtaccttgcccacgatctcgcccagctcatggttgttgggcttgatgaggaaggggtggtagggcagcacgtttaccagaaggtcgcgggtggcatctaccacggcgcgcacgcccctgccctgcagccgcgccagcagccgctcgtagacgctttgcggcaggcttgccgggatgctgcctgccagaataaggatatcgccctcggccagcttgtccagctgggcttccagctgctgcaaagcgctttccgggatggcagggcctgcgccgttcagctcagtctcctgcccggccttgatcttgacgttgatgcgggtcatgccgttttccagatgcacaaagtcggtcttgagcccctgtgccgccagaccgcgctccagccatgcgccggtctccccggccacaaagcccagtgccacgctctcgcagcccagctgcgccagcacgccggacacgttgatgcccttgccgcccagcacgcaatcctcgccttgggcgcggttcactgcgcccacctccagcggtgcgtccagacgcacaacgtagtcgatggccgggttaaaggtaacggtgtaaatcatgcttctgcctcctttacaaaggtatactgtttatacttagggttcgggcagcggttggtcaggatggcaccgccgtgcaggtccgtgatgaccgccgggtaaattttagcaaatttggcgtcatccacaaggaaccagctttcccgggcgcggcggacggcagcggcctttaccgctgcttcctcggggtccggggtggtaaagcccgcctccagcgccacgccgttggcacccatgaacgctttagtgaagttatattgctggatgctgctgaccgccggagcgcccacgatggcttcggtctgggggcgcagtagcccgccgggcagatacacccggcagcccttctgcgccagcagccgggcgtgcgccacgccattggtcacataggtggctttgagcgccacacccgtcaacgcccgcaccagctccagcgtggtggtgcctgcatcaatgaatacaaaatcctcggcagcaatgagcgctgcggcggctgcggcaatgctgcgcttttcggctaccgccagcgtctccttagcctccatggtaggctcgtctgccagaaagcggctgtccggcagggtggcccctccgtgtaccttggtcagcctgccctgccggtccaactcggtcaagtcacgccggatcgtggattcgctggtgtgcagcgcctcacacagctgctgcaccgtcacggtgcgctgctcgttcagctgctctaggatcagcgcaaaacgttcctccgccagcatggtgtcttttcccttctttccttcccacgcctgaccgtttccgcacggtcttggcgtgttttggttgtttgcatctttattatagcaaaaatcttgtcaaaatcaatcagcttcggtcattttcgatcgcaaagaattttcatcatttttgtgcagaatttccagcgccttggatacaagagctttttgcacgcaaaaagaccaccgcacttgtgtatgcggtggtcttttctgcgtttatgtgaccggtcgcgaccggtttttgtgctccggctggtttacctcaggcatccgagcgggagtaggcgttcttcatctggctgctcagctcaaacagcaccttgtccagcgtgtcggcggccttctcctgcagcatagcggcaatggcggtgttggcttcctcccgcagggcggcgcggcttgcagcgtccggctcggcggcaagctttgcgtcgtactggttcaccagtgcgcgggcagcggagagcacggcctcctcgtagcgctcgaggtggaagagggatttattataggaggcgtctgccatggcggcaatcagacggctggtccagtagaagttatcggtggacacagtgccggtggtgttggccagatactccggggtacgctccacgttggcgtagaagggcaccatggtgttgaaggcgttggaggcataggccacccactccacagcgcgggattcctccggctggtcgggacgcatctgcaaaagcgccataaagtcattgcggttgatgccgatggaacggtacgcgccctttgcggacttgtcgccgtagctcaggtagggatcatagggggtgccctgatagtggctggacagcatatacttgatgtcctccggggtcaccttgcgctccggcaccatgcaccacggcaggtcatcggacatgggggtgtagtcggcgtcggcaccctcccacacccatgtgcgggggttgaggtagcgcagcatataccatgcgcggggggtgttgtaaacgtggtcggcgtcatcgtggctgccaaaggcatcccgggggttcagtgcgccgtccaaagagaggtcgaggtgattcttggcaataaactcccgcaggtcggcagagcagaggtagttttcctgtgcgccgaaggcatcttccagatcaaaggtgtcgatgcccagttggttgggcatgaccacatacacatcgtccggcacgcggcgggcgatccagtggtgaccgccgatggtctccagccaccagatctcgtttacgtcctgaaaagcgatgccgttcatttcgtaagtaccgtactgttccagcaggctgcccagacgcagcacgccctcgcgggcagaatggatgtagggcagcaccagatagacgatatcttcctcgccgatgccgccgggcacctcgggcttttcgcccttggcgggctgatactccaccagcgggtctgcgcccagcacgcggggattggatgtgatggtctcggtggcggtcatgcccacattggcggcgttgacgccggaagccgcccagatgcccttgccctccacggcgttgggcatggcggtaaaccgcagtgcgccctccggcagggggatctccgcatgggagaggacgctgcggtagattttgggcagctcctccgggtggatcacggtaaattttttagcggtgaaatggccggagccggagtcatcgttgcgggcgatcatggtagagccatcgtacgatgctgccttgccgaccagaatggtagtgcaagccataggttttccctccatattctataatgtgcctctattgtagaacttttgcagcggaatttcaaccgggaaacaaaaaccgccgcgctgcgtaccacggcagagcggcgggagatggaatgcttttttcaggctgttactgggctgcccagtagaaatcctcgccgggcagcgtaccgcccacggcggcagggtcggcatcgtagagcacctgcaggtaaccggagacgtctgctttcagttcctcgccggtcaagcagacgatgttgcagttgggcagtgcctttttggcaatggcggcttttgccaccacgccctgctcctcacacagagcggcggtgccgtccagatcggtgttggcggcgttcacgctctgggcgtagtctgccagaaaggcggctaccacgtccgggtgctcctcggcgtaggccttgcgcaccacggtcacaccggtgatcagctgggtgtctgccaccttgtcccactcggcggtcaggtcaagagctacccgcagggtgtcgtccttcagcccggcagcggtcacatagggctggggcagcaccgcaatggcgtcctgcgtgctggccatctgggcggttacctcagtagcctcgctgtaatactggatatccacatccttgtccgggtcaaggccgttggcggtaagcagatagcgcagcacatactccggggtagtgcccttgccggtggacaggatggtgcggcccttgaggtcggccgtgctgtgaacggtgtcgccctgctccaccacatacaaaacgcccaaagtgttcaccgccacggcctgaatgccgccgctggttttctggtacagggtcgcagccagattggccgggatagcagccatgtccagctcgcccttgatgagcagcggcacgatctcatccgcagcgccgtaaagctgcagatcgtagtccatggcggcagtaccggcctgctccatcgacagcaggttgacaagccccatggtggtggggcccttcagcccggcgatacgcagcggctcggtagcagacagcggcgctgcggtctcttcttcctcggaagcagccgcagaggaagcaacttcggacaccgctgcgctggaagcggcagagcttgcgctgccgccgcaggctgcaaggctcagtgcaaggctgaacgccagcagtaaggacaggatttttttcatgaaatactccttttcacacccggcacgccccggtacgggaagcggaaaccggtctttttttgaaaaattttgcaaaatcatttgctttgcgcgttccagtttactataataggggtaaaaataccgttgcgtgcgcaacgtaattgcaggaggctgcggagaacgctattttctctgcggagttgcgatgaataattatctgccgctgttacaaaccaccacgctgttcgcggggctttccgctgcggagctcagcacgctgctgtccaggctggggggcagtgtgcgcagctacggcaagggcgaagcccttgtgctggcgggggagcccagccgccgggtgggcatcgtgctgtccggcgagctggaggcctaccgcccggcaccgggcggggtgcgcatccccatcgcccaggtagagccgggcggggtgttcggggacgtgctgggaggctccagcttgtccagcccggtcaccgtgctggctgccgccccctgtgaggtgctgctgctgccctacgagcggctgctgctctcggacggcagccccgcccaccagcgggtggtgcagaaccttgtgcgcaccatcagcgataaatatttttccctctcccgccgcatcgacctgctggtgatgaagagcctgcgcgccaaggtagcggcctatctgctcagcgaggccgcccgcgcccacagcctgaccttcagcatccccttctcccgcatccagctggcggattacctcaactgcgaccgcagcgccctttcccgggagttgagcaccatgcagaaggaagggctcatcgacacctaccgcagcagcttcaagctgctggagccggatgccttgcagcagatggtgcaatagaaccctctcaggcgctttgcgccagctcccccgaggggggagctttatgcaagttttcagaacagtctgccttctccggcagaagagcaagtgttcccctctgccgagaaaagctccccctttcgggggagctggcatcgcacagcgatgactgagagggttattttataattaaggagcgataaaacaatgtccaagcccgtactctggatcgtgatcccctgctacaacgaggagcaggtgctgcccattacagcacccatgtttctggaaaagatccacagtctgaccgcacaggggctggtcagcgataaaagccgggtgctctttgtcaacgatggctcccgcgacaaaacgtgggaactgatccaaggctttgccgcacaggacgagcactatatcggcatttcccagagccgcaaccgcggccaccagaacgccgtgctggcggggctgatggaggcgctgcacagcgacagctgcgatatcaccatctccatcgactgcgacggtcaggacgatatcaacgccatggacgagatggtgaaaaagtatctggacggtgccgaggtggtgtacggtgtgcgcagccgccgggacactgacaccttcttcaagcggttcaccgccgagggcttttatcatgtgatgaacgccttgggcgcagatatcgtgttcaaccacgcagactaccgcctgatcagcacccgtgtgctggaaagctttgcggattacaaagaggtcaacatctttttgcggggcatggtgccgctggtgggctttccccacgatgtggtcacctacgagcgtcacgagcgtctggccggcgagagccactaccccctgagcaagatgctggcgttggcttttgacggcattaccagcctttccaacaagcctatccgcatcatcaccggagcgggcatcgtggtgagccttgtcagctttatcggggtcatctgggccatcgtgtgcgctgccatgggcagcagcgtggcaggctgggcctccaccgtctgcatcgtctgctttatgagcggtgtgcagctggtgtgtctgggcgtgatcggtgagtatatcggcaagatctatatggaaacaaaggcccgcccgcgctatatcatctcggagcgcacatgggctccctacgaaaggaaatatcacggatgagcaagcaaagttggaagggcagcacccttttgaacccggagccgccggtactggtatcctgcggcgggctggataagcccaaccttatcaccatcggctggacaggcaccatctgcacccagcccagcatggtatccatcagcgtgcgcccggagcggtacagccatcagctgctgtgcgagagcgggcagttcgccatcaatctgcccactgaaaagctggtgcgcgccatcgactggtgcggcgtgaagagcggccgcgaggtggacaagtttgccgcctgcggcctgcacgccgcccccggcagcgtgctgaccgactgcccggtgctggaggaaagcccggtcaatctggagtgccgcatcacccagcgcatcccgctgggcagccacgacctgtttttggccgaggtggtggcctgcgatgtggacgagagcctgctggacgaaaaaggcaagctgtgcttggacaaggcaaatctcatcgtgtacagccacggcgagtatctggcccttggcaaaaagctgggcacctttggttacagcgtgcggaagaaaaagcccgcaaaacgcaagaaacagtaaaagcaactccgcaaaaacaagtacagcaaggctgagcatccgagaaagtcaggtgctcagctttttccattttcgcaggcagcagcttcggctctataataaaagctttctttctgccgaatctgcccagagcagcgcggcaggcattttcaatcgtccaattcccgttgcattccgtccgattttgtgatatactccctactgctgtgcttttttgtacagtatcctcaaagagcaacttaggattttaggctccccggtgccactcgagcggcgctgggcaaaacccacaggagctggcggttcctgtgcggtcaaaatcaaaccgctggagtattatcatgaatcagaattcttccgtccgtaagctggtgcactgcggtgtagtggcagccatctatgtggtgctgtgtctggcactgcagcccctttcctatggtgctgtgcaggtgcgtgtggccgaggctctgtgcctgctgcccgtgttcggtgcagagtacatcgtgggcgtggtgctgggctgcttcctggcaaacctgctgggctccaccatcgtggatgtgatctttggcacactggctaccctgctggcctgtctggtcacctacaagctgcgcaatgtgcgcttcaagggtctggccattgccgccagcctgcccccggtgctgttcaacgcggtgatcatcggtattgagatcgccgtgatgttcccggaccccacgtccagcgcccccatctggctggcctgcatcaccaacggcatctcggttggcatcggtgagctgatcagctgcacggtgctgggcgttgtgctggtaaagttgatcgagagcaacgccgcactgcgcaaggtgtttgtgacggaataacgcaaggaggtttccatgcagccaaacggtatgatcttctgggactggaacggtaccctgatggacgatgtggattttacccacaactgcctgaactggatgctggagacccacggctacccccagcggtatgatctggcagcctaccgggagctgttcggctttcccatcgaggactactaccgctgtgccgggttcgattttgcgcggcacccctacccggagcttgccgcccgctttatggagcactacaacgccggtgtgcccggctgcgctgtaacggcacacgccgttgacaccctgcaaacgctggcccgcatgggctggcagcaggctgtgctttccgcctcccgccgtgattacctgatcgagcaggtatccgcccggggtctgcaaggcttttttaccgagttgctcggccttgcggacatttacggcgtaagcaaggtacagcttggcaccgattatctgcgccgcacgggcatcgcccctgcggcctgtgtgatggtcggcgacaccgaccacgatgccgcggtggctgcggccatcggtgcaacttgtgtgctgtacaccggcgggcatcagtcccgcgcccggctggaaaaggccagtccctacgtcatcgacgaccttgcccagctgcccgcactgctggaaacgatataatatcagtggctcagaaacacctgtcggtgtttccgagccacttttttacagcctgttctcgcaaaagcaaaaaaagaccagtacacaaatgtgtactggtctttttggtcggagcagcgggatttgaacccacggcctcctcgtcccgaacgaggcgcgctaccaactgcgctatgccccgaaaataccgcagcttattcggctgcggtaactggttggggatgagagaatcgaactcccacaagtagagtcagagtctaccgcactaccactatgcaaatccccaatattcggttgtgtcagccgcgccgtgcgttgctgacaagggatattatacacgccggcgggctgcttgtcaaccattttttcagtttttctgcaaaagttttcgcagcggctttccggtgcacacaggcttgtaaatttttggtttttctcttgacagcactcccctttcggaatactctaatactataaaaaggtaggaccccggtcagcccggcaccctttgccggaccgttcggctttgcctgaatgataatgaaagagggtatttgaatgaaaaaacgtgttggtatcctgacctccggcggcgattgtccgggcctgaacgccaccatccgcggcgttgcaaaagcactgtacgcccgcatgggagataacgtggagatcgtgggcatcgccaacggttacagcggcctgatcaacggcgactaccgtgaaatgaacgaggacgacttccgcggcatcctgaccttaggcggcaccattctgggcaccaagcgcacccccttcaagctgatgcgtgtggtggaggacgacaacattgataaggtcgccgccatgaaaaagacctacaaggcggcaaagctggactgcctgctgtgtctgggcggcaacggcacccacaagaccgccaacctgctctcgcaggaggggctgaacatcatcggcctgcccaagaccattgacaacgatatctacggcaccgatgtgactttcggcttccacaccgctgtggacatcgccacggacgtcatcgaccgcatccacaccaccgccggcagccacagccgcgtgatgtgcatcgagatcatgggcaacaaggccggctggcttaccctgtactccggcattgccggtggtgcggacatcattctgctgccggagctgccctacgatatcgaccgcgtgtgcgaggccgtggagcgccgtgccaagaagggttccaacttctccatccttgccgtggccgagggtgccatcaacaccgaggaagcccgcatgaagcgcaaggactggatggccaagcgcaccgaggccggccttggcaccaccgccaccaaccgcattgcacaggccgtgcagaaaaagaccggcatggagacccgcgtgtgcatcccgggtcatatgcagcgcggcggcagccccagcgcctacgaccgtgtactggccacccagttcggcagctatgctgcacagctggtggaggtggagcgctacggcgtgaccgtggccatggtgaaccgccgggtgaccgagaaccgtctggcagacattgccggtaagacccgcaatgtgcccgaaaactgcgagctgctgagcgtggcccgccgcatgggcgtctgtctgggctgacccctgcccgcaagaggaaacactgagaaaagcgagacaccggaaagtctgctgactttccggtgtctctttttatgttatgggcagcgcaaaagggttggcgagcggctttttacggtaaattttgccgttgaagctgcgctttctgtcccaagtgcgcaaaaaaggttgtcaaaacaggaaaaacagggtatgataagagctggatcgcaaagctgcggtccttcaatattgttaaaggagtgtgctttgttatgcgcgcctatgaacgactgcttgattacgtcaaggtctacaccacctcggacccggagtccggcacccatccttccgctgcgcgggagtttgatctggctcacaagctggtggaggagctgaaggctctgggcgtagaggatgcccgggtggacgagcactgctacgtctacggttccctgcccgccacccccggctgcgaggaaaagcccgcactgggtctgatcgcccacatggacaccgccccggatgccagcggcgagaacgtgaaccccatcctgcacgagaactacgacggcggcgatgtggtgctgcccgccaccggcaaggtgatgaaggtctccgccttccccttccttgcctccatgaagggcgagaccctcatcaccaccgacggcaccaccctgctgggtgcagacgataaggccggtgtggctgagatcatgaccgctgtggagaccgtcatccgcgagggccgcccccacggcaagctgtgcatcggctttaccccggacgaggagatcggcgagggtgccgacctgttcgatatccccggctttggcgcagactttgcctacacggtggacggcggcgatgccggcgacatcgagtacgagaacttcaacgccgctgccgccaccgtgaccatccacggcttctcggtgcaccccggctctgccaaagacaccatgatcaatgcctccaacgttgccatggagttccacggcgctctgcccgtgatggcacgtcccgagaccactgaggggcgtcagggcttctaccacctgtgccagatgtacggcgatgtcaccaccgcaaagctgggctacatcctgcgcgaccacgatgccgccaagctgcagttcaaaaaggacaatatgcaggacattgccgattacctgaacggcaagtacggcgcaggcaccgtggaagtggagatcaaggacagctaccgcaatatgctggaaaagatcaagccccacttccacctcatcgagaccgcccgcaaggctgtgcgcatggccggtctggagccggtggaggtgcccgtacgcggcggcaccgatggcgctaccctgagctggatgggtctgccctgccccaatctgggcaccggcggcttcaacttccacggcgtatgcgagtgcaccaccgtggagcggatggaccgctgcaccgagatcgtgctgaatattatctccctgtacgcagagtgatctgctttttctgcgaaaaaactttcagcgtgaaaacggtctgtccctatcgttcaacataaaagcggcggctgcacaatgctttgtgcagccgtcgcttttcatttaacctacgttgatatgccccactggcatgatcttgcgcttgttgtcgtccggtttggcggtcaggctcatggcaaaggccaccgggcctacacggcccatgaacatgaccagcatatacaggatctttgccccgttgttcagctggctggttacgcctacggaaaggcccaccgtaccaaaggccgagcaggactcgaagatggcatccaccacggacacggcgtccgaggtgttgtagtacaccacaatggccgagccgatgaccgccacagcgcccagcacgataatggtcagggcgcggtagacggtcttggactcgatatgatggtcagcgatcacacagtcatcgcgtccctgcgccacgctgcggatggtcaggatgatgaccgcgaaggtggtcaccttcacgccgccgccggtagagccgggcgctgcgccgatgaattgcagcacgctcatgagcagcttgctcagggtgccgcaggaggccagatccacggtgttcatgccggcggtacgggtggataccgactggaacagtgaagccatcaccttgccgggcaccgacagtccgcccagcgtggcggggttgttccactccatcagtcccagccccagcgcgccgcccagccacaagatcaccgagaaggacagcaccaccttggcgtgcagggacaggcggcgtttctggtaccactggcacagctccacccagaccataaagcccagaccgccggagatgatcatgaacatgatcaccgcctgcacatagtagttgttgacatagggcaccagcgaggagtacgccccgaaccgtccgaacaggtcaaagcccgcattgcagaaggccgaaatggcggtgaatacgctgatccagacgccctccagcccgaactgcggcacaaaggcgaacagcagcagcagaatgccgatgccttcaaacatcgctgccagccccaccacgatcttcagcacacttttggcctgatcgtagccgtccgccgaaacgctttcgcccagcaaccgcagatcccggaagcccatgcgccggcgcatggccagcgcaaaaaagctggtaagggtaacaagaccaaggccgcccacctgaatgagcagcagcaccactgcctgcccgaaccatgtgaactgcgtccacgtatcccgcaccaccagaccggtgacgcaggtggcgctggtggctgtgaacatggcgttgagcacatccagccgcccgtgcctgctggcaatgggcagggtgagcaggagcgtgcccagcgcgatgacagcaataaagctgacgcagatgatctgggtcggggtgctcagtcccagctttctccgccggaccgacctctggtgccgcagctttttgcggatattttttatcttttccatagcatcctccctgcgcagcacgcagccgctttgcattcctttatagcatacaccattttgcccgcaggttcaacttgattttacagcccggttgcggtattataatatggtactgtatttttggggttttctgccccaaggatgcagaactgtgtctccgtagctcagctggatagagcgtccgcctcctaagaattcggtcaacctgataccttgggggaagaagtgattgctctaatcaaaagcaagaccgggaatcgaagttttctcaacaatttttgatgcaacaagtttaacaccgttccggttgcaacgcagtcggtcacttcgttgtgaaaagcattccatacaaagtgcagaaaagtcaaaaatcaacgataatacatatatgtctctatacctcagctggatagagggttcgcctcctaagcgaaacgcccccggttcgaacccgggtagggacatccttttaagaaatgcgaaggtcatttttccatgtgaaagacgatcttcgcatttttcattttgaacctatcaccaaaattagccagctaatgccattagcagaattttcagctccagctaataaaatcggctttccagctaatgaagcctcataaagcgccttttgaaccctgttttctggctctctgctaagattggtaaacgctttcctgtaaatccatgtaaatacaagataatctgtgtgaatctattttccacctttctgctggaagccgtgcaaaacacttttctccatacatagcgcgttcactcgctgttctctcggaacagaaagaggaacgcgcttttttgttttcgggccgaacttcccgaatccaccaaaggagggtttaccgatgaaaaaagttctgaccgtcacgatcgacggtatccgctaccatgcttcccgcccggcagattgccggcactgcttcttctggaagaatcgaaagaagggctgcgttctcggcaaagagaactgctactacctgatcgagccgcccaaaggccccagcaagtgcgaagggtgcccctacaagcgggcaaagccctgtgtgctggttccctgctacaaagacttgatggcaccgctggagaaacgaggtgatgccaagtgagccacaagcgaaacgaagctctgcgccatgttcagcactccatgcaccatgtgatcgccgctggcgaaggttccgaccgtgccccggacagttgcaagctgtgcccgtactatcgacccgatttcaagttccgcacctgcctgtatgcccactgcccttataagaagcaggtcaatgtattccgttccacacctgaaaaatgggatattctctatgcccgaaaaaaagccgacaagaaccgcagaccttgattacttctatgggcagtccagcgagctgttctccttctaccggattcccaagctgttgtttcaggatagccgcttccaaccgctttccacagatgccaaaaccctgtacggtatcctgctggaccgcatgagcctttcagcccggaatggttggttggacaaagctgggcgggtgttcatcatctatactgtgcaggaggtgcaggattcactgggctgtgccgataaaaaggcgaccaagctgctgcgagaactggaagagtacggcctgattgaacgcaaacggagggggctgggcaagcccgatctcatctatgtgaagaatttttcgtcagaatcgtcaaaactacgctttctgaatcgtgataatgacgattctggagtcgtccagaatacgcttcaagacccggccaaactacgatgtaataagactgatagaaataacacagaggtaagcgatactgatcctatctattccgatgaaaacgactggatgagcaaacgcgcccaactggaagaatatttttcacgttctttggagatggaccttcttctccggctttacccggatgatgaagataccctctaccaaatcgtggatttgctggtggatacctgtgccaccaaccgcaagacgctgcgcattgccggggacgataagcccgccgaggtggtacgcagccggtttatgaagctgaacgccgaccatatttgctttgtgctgaagtgccttgcagagaacagcagcccgatccgaaacatgaaacagtatctgcttgcttctctatataatgcacccaccacaatgcagcttttctatcagaaccaaaccaaccatgacttagcgatgcggaggtgatgaaaatttcaaagaaagcaaccacaatagccatcgtcaaccagaaaggcggcaccggcaagaccacgacctgtgaaaatctgggcatcggtctggcgatggagggcaagaaggtcctgttggtggacgctgacccgcagggcagcttgaccatcagcatgggctggcagcagcccgatgaattgcccacaaccctttccaccctgatgcagaaagccatgaacgaccaaagtattccgcccggcgaaggtatcctgcaccatgcggagggcgttgacctgattccagccaacatcgaactggcagggatggaagtgtctctcgttaactgcatgaaccgggaaaagatgctgaaacaggtgttggaaggtgcaaagcatgaatacgatttcattctgctggactgcactccttcccttgggatgctgaccgtgaacgcactggcagcagcagacaccaccctgattcctgtgcaggcgcagtatctgtctgcaaaaggcttggaacagcttttgcagacggtgcagaaagtccggcggcaaattaaccctcgtctgaaaatcgagggcatcctgctcaccatgaccgacagccgcaccaactacgggcagcagatcgacaacctgattcggggtgcttacggcagcaagatcaaggtgtttgaccagaccattccccggtctgtccgtgctgcggaaatcagtgccgtgggcaaaagcattttccagcacgaccccaaaggcaaggtggcagaagcctataaatctctgaccgaggaggtgatggcgaatgccgaaaaacagcttaaacgtgtcgctgaaaggggcagatgacatcttctccacggaagaatcccgacaggagcagcagagggaacaggttcagcagattcccatcggagaactgttccctttcaagaaccacccctttaaggttttggatgatgagtccatgcagcgcacggtggaaagcgtagaacagtacggcgtgctttctccgctgattgcacgtccacgcccggaaggtggctacgagatcatctccgggcaccgccgtcagcacgctgcacagcttgctgggctggatgccctgcctgttatcgtccgtcagatggatgatgatgccgctgttttgctcatggtggattcaaacctccaaagagagaacatcctgcccagtgaaagggctttcgcctacaaaatgaagctggaggctctaaaaaatcaaggtgctaggtcagatttaacttgtggccaatttggccacaagttaattggtgcaaaagcgcgagatattgtcgctgatgaatcaggtgacaacgctcgaaatgtccaaaggtttatccgtctgaccagcctcatccctgaactgctggacatggtagacgaaaagaaaattgccttcaatcccgctgtggaattgtcctatctggacgaaagccaacagcgggattttttagaagcgatgaacgacacccagaatgcgccgtccctatcccaagcgcagcggctcaaaaggctggcgcaggaagggcacttctcgtatgatgttgcctttgcggtcatgggagaagagaaaaaggacgagctggacaaggtggtcatcaaaaacgacaccctgcggaaatatttcccgcgcagctacaccccgaaacagatggaggacaccatcatcaagctgctggatcagtggcagcgtaaacagcagcggcagaatgaacgctgatacaccttttgaacgtaagacccgaccgggtctttcttttttgcaaaaatttggaggaaacccactatgaatactaccattgatctcaagaccgcaaagaccatcgaagccatgaaccagaagatcaaccacatggacaatgctgtaaccgacttcttcaacaagatgagtgatgtgctggagcggcagctcggcgatgatgaagtttacgccgccgtgattgccccggagatcgaactgaccatcactccgctggcgaacgttcgcagttacctgccttgcttcgatgaagcagattcctgctacagcatcagcgacgatgtgccgatggctctctgttacgaccctcgtcaggtcatcacactggctggcaagcggtatctgtccggtgccgttgtctttgttcgctacgataccaatggcagctttgttgcccttaccaccagtgatctgtacctgattcagtgttatctggccgagaacagcgtccctcttatggctggccgcgagaagatggtctgcatctgcattgactgagaggtgcagcatggataccgaaatgacccgctatgagagtttcgcagaagtcacggaggacttttactgttccgccgttgatgttttgaagattctggttctccgtctgcacgactaccatgctcgttgcttccattctctgcgggatgctctgtacgactatttttctaccgatgccgcaccgcatactcatgccaatgtttccactaagcataccgtcaccgcatctagcgctcctcgtcctccctgagaggattcttctcacagttcagtcaatgtaggaggtttgctatgaattatatttattcgtttatcatttttgaggctggtgccttttccggcttctttgtggcagctctgttgaacgccgcccgtgctgggcaggaaatcactatcaaatttgaggaggaagataatggaacagaacgagaacactctgtcggtgctgaaaattgcaccggggcagtatccgcagcaggtcgagatcgataacgacctgaaagccttgcagcaggcggtgggcggctccatcggcgcaagctacccttttgaagatccggttgccatcgtctataacgatgacggcaagcttatgggtctgccgctgaaccgtgccctgtgggacgaggacgggctgatgtacgatgtcattgccggaacctttttggtggtaggtctgggtgaggaggattttgtatcgctctccccggagctggcgcagaagtatgaagaagaatttcatcaacccgaagcctttctccctctggagcgtcgcctgatggtcattccggtgccggatgaatcggttcagaatgacgcagagaaggccgtaaacaagcccccggtggaacatgaccgctaagacgattttctgcacaggaggtggtaacgatgcaggaagaaatcgagcataagacggtcaaccttgccatctcgaccacaaaactgtccgcccgcaccctgctgcgcgggatgcagtttctgttgcggcagtacgacaagcgcgcttcgcagggcaagcagtccatgaagcggttggtacggcagaaccgtggcgtgaccaatgtggagattcagaaaaccggtatcaaggattttgaccgctatgccaagcggtatcacatcgactactccatccagaaagacctgtcctgcaagccgccccggtatctaatctacttcaaggcacaggacgcggatgccttgaatgcagctttcaaggaatattcggcatcggtgctggataaaaccaagcgtccttccgtgctggcaaagctgcatgatctggcgcagtccgttgcaaatctgccggacaaagtgcggcacaagcaggaggagcgcggcctatgagcaaaaagaagctttccaagctgctggcgatctgtctgccctatgtggtaattggcttgctggcaaccaatctgggcgaggcgtggcggctggctgcgggtaaggaactgggcgataaaatcgtatcgctgatggatactctcccggctgcattttccaatccgctgcccagcctgcgcccatttgacttgttcattggtctgtgctgcggtgctggaatgcggctggcggtgtacctgaaaggcaaaaacgccaaaaagtaccggcatggcatggagtacggctctgcccggtggggaactccgaaggacattgagccgttcatggcaccaaagttcgccgacaacatcatcctaaccaaaacggaacggttgatgatgagcaatcgcccaccggaccccaagaatgcccggaataaaaatgtgctggtggtgggcggttccggcagcggtaagacaaggttctttatcaagccgaatctgctgcaatgtgattccaagaattttccggtatcattcgtggttacagatccgaaaggtagtatcggcgtggaatgtggagaagccctgttaaagcacggctacaagctaaaattcttcaacacgatcaacttttccaagagtatgcgctataaccctatggcgtacatccatagtgaaaaggatgtgctgaaactcgtgactgcactgatgaccaacaccaaaggtgaaggtcagggcggcgactcattctgggacaaagcggaacggcttttgctggtttcactgattgcctatctgcattatgaagccccagttgaagagcaaaactttgcaacattgctggaaatgctaaacactatgcaggtttcggaagatgatgaaacttatcagaatccagttgacctactgtttgaggatctgggcaagaagaagccaaaatcctttgccgtgcggcagtacaaactttacaagctagctgccggcaaaacggccaagtccatccttatttcctgcggtgcccggcttgcccccttcgatattcaggaagtccgggatgccaccatgtacgatgagctggaactggacaagctgggtgaccggaaaacggcgctgttccttatcatgagcgatacggacagtacatttaacttcctgatctccatgatctacacccagcttttcaatctgctctgtgataaggcagatgaccaatacggcggcaaactgcccatccatgtgcggtgcctcattgatgagtgtgctaacatcggtcagattccacaactggaaaaactggtggctaccatccgcagccgtgagatctcggcgtgtctggtcttgcagacccgcagccagttgaaagccatctacaaggacaatgcggataccatcgtgggcaacatggacagccagattttcctcggcggcagcgagcctaccaccctgaaagatcttgccgaagcactcggcaaggaaaccatcgacagctacaacaattcagatacccgtggcaatagcccaagctatggcaccaactatcaaaaactcggccacgaacttatgagccgggatgaactggcggtgctggatggcggcaagtgcatcctgcaattgcggggtgtgcgcccgtttttgagcgacaagtacgacctgacccagcacccgaactacaagtacacctccgactatgaccccaagaacgcactcgatatcgagaagttcttgaaccgaaaagaaaaaatccacccagacgatacctttgtcatggtggatgctgattcactcccgcccgcctgataagacgagcggttattttttacccattgacccaacaggtacaccggaaaatcagccttcgccgtggttttcggctttttgcaaacggatttcaggtgtgtgcagggtcactttttcaaaacaaggagatttttctatggaattctttaacagcgcagtggacgttctgaagactctggtcgtggcattgggtgccggtctgggcgtgtggggtgccgtcaacctgatggagggttacggcggcgataacccctccgcaaaaagtcagggtatgaagcagttcatggctaattaaagggaacaaaaagaaagggaatgcacaatccagacggtatcagcggcaggctacaagaataaattgtgatttcacaagattggtgttataataagagaaaagttcctgccggggcaaccgccccggtggtatggatagaaaggcaggaaaacaatatgcacatcagctataaaccactctggcacacactgttagagcgtgatatgagaaaagaggatttaaggcttgctgctggtatgacaacaaatatgattgccaacatgagcaaagagggaaagcacatcagcatggatacattagcccgtatctgtgaaactctgaattgtgagattactgatgtgattgagttagtaccagacgagcctgcttccacaggaggtaaggaacatgagcgaattgaaaccaagaataacggaaaacggaattgattatatccttgtcggagattactacattccaggcttgaaactgccggaggaacaccgccctatcggaaagtacggacgaatgcaccgggaatatttaagagaagtccacccagccagattgaatacattgatactgaccggagaattgttgacatatcttgcagacctgaatgaacaggcacaggaacggttagacactattatggagcagatgaaagctaccgagggcgtgacagaggaattgaagtgtacccgacaaatggaatgggtgcagcgttgcaataacattcacaacagggcagaagaaattgttttgtatgagatgatttattcataacgggagcaattaaatcggaggtatataagatgattgaaattgtatttggtgaaagtgcctgtggaagtttgaaaattgcccaaacttacggcaagggaaagtatagaggaagtgctgtttcaatatttatgaggcacgaagacgggagtgttccatcttcagatgaaatgaaaaaggcacagcttcaagcacaggaacaagaacgcattgcttgggagaatgctattccattgggaggcaagagcagtgatgtttattgttttgatatggttcttagtgtgggagatatttctgataatggaattggcgaacagcggaaaaatattttcaagaaaatgctgtctgtctgctttgtagaggatttagattatcaggttgaagaaaaaatacagaaaattaaaactacattgacctcagtgattgaacgatatgtagctggggaagaaattcgcatttggtatagctataatccagatgagctttgtggtatgtattggcttatgaaacaacttcaaccattaaactgccagacaacaatttatttggttaagttacctacatgggaatatggaaaagaaaatactatgacatccaaaatagcatggggcgaggtgtctcctggcgaatggggaaactatataactctacaagagaaagctaatcctgtatttctttcagcttgtactatgaaatggaatcaacttcaaaatgaaaatgcacctttgcgtgcaatgttaaatggtaaattgcaaagcgtttcagaagatatatatgatagtttcattcttcgtgaaattgcggaacagccagagcaattcaaaatggctattgtcataggtaatgttttaggaaaatatcaacttggaattagtgatgtatggatttccaatcgcattgataaaatgcttgaagatggtgtgttggaaattatacaggacgcaccaaagggagaaacaaattatcgccgaatattaagaaaacgaatgaaataataaccacagcacaaaccgctgctacatggaatccaacaaaccatgcaacagcggttttcctttaccgttttttcctctggctgataggcgttcccattttctttgattttttgagaatacgaatcagccagcgaaattcttcgtctgacagatttttatagttgatgccgagctgcttgcagtaaagaacaaccagcttttcatcccggctgcccttgaaattttcgaccgcttccagattttctttcagttcatcggcaacggtggtctggggcgcactctcactgtcctttttgtgagcttcccgaatatcccggataatgaggttgaggtcatccagaaccatgtggctgaaatattcatcatcactgatatgggcagcttgcagcaccttcaaatgcgggtcatcttcgccggggcgataccgttcaatgatttcatgccggacagtatcaacaagggcattgaggttttgaatctgcatggtggcaatcccatccacataaatctcaatgtccgcaagaaacttgataaagtccttatgggtggcaagttcgcagagcagacggttgttaatccgaccgcttttcagaagtgctaccatctcatcactcaaatgaagctcccttaatggcgtgttgatctccgcccggttctctgtccggcaaaagagataatcgagggacaccccataaaaatctgccagcaggataaggttaccatgattgatttccttatagtcatctttttcataactgccaagagccgattttgaaatacccgtttgctctgccagttcttccagttttaatcctttgtttaatcgtaaatcttttagccgttcctgtattgtagtagctccgttcattgaagcagttccccctttctgacaacatttataaccgctgaattgattataccatatcaattccgcaatcgtggaaatttctgatttttacccctaattcctactttgtggacatacggcacagggcacaaaaatgttctatgatacaggtagttcatcgatggattattccaatcgaatgaccagcctgtgtgggatatgcttccccggcgatgtagtgccatgacttttggcagggatgtggaggaaccctgaccgaaacgagcataccaaagggagcgatacgccgttgtgagattcaggggaggaacgacaccggggagaactggcgaactgacaccgaaatgataccgaaacacgacaatctgatagggggatagtctaccctatcgctgatacttcgggagattttaagcggctctatgaccgtaattttgccgaaaatcgccccgaaaccatacactaaaacgggaggaagcgcaatatgccgagaatgagcaaaaagaggaagcatgagctttctttttacctcaatgaccgggggcgtgtcacttacaacgaattatgccggaaatgccagcatgggtgcaggcagagcttccgggcggttgtgattgactgcccccgttatttatccaaacgagcaaagaaaaaggagaaacacaccgaatgaattttgaatttatgacgatagacacaccattgccgccctgtatgccttttcccagagcgttgacaggatttccagttagcagcaccgcaaaggtcatgtactgccggatgttagacgctatgctctccaaaggacaggaggacgagaacggaatcctgtttgtctgcttccctgttacagccattgccgcagtcttgtcccgcagccccatgacggtcaagcgttctttgaatgaactggaaaccgccgggcttatcatgcgggtgcgtcagggcgttggagaaccaaacaggatttatgtgctgataccgggaaaggaggacgctgcccttgcctgatacctcaaagctggaaaagctaaaccgggagctggagaaaagcgaaaagaaactgcggaaagccatcaatgatgaaaaggcattgcagcaccagttgaaacagcttacccgaaaggaacggacgcaccggctctgcactcgtggcggtatgctggaaagttttctgcaagagccggaacgcctgacagatgatgatgtcatgctgttgttgaaactcatttttcacaggcaggacacgcaggaactattgaaaaaactgctggaacgggagaagccggaaaccccttagtttactaagggcgcaattatacaccacccagaggttggtgcattgcgttctccgaaggctcctcgccggagggctgtgattttccgcagtcatggtctgcttcaaatcaaacaggggacgctacgcttcccctgcgctggctgccgccagctacccttttgtggacttgccatctggggacatcttgcgttgcaagctgttcccagccgacaagtttcataaaatatgctatctttttgataggcagtgaagtataatgaagatgacaacaaatatgaattttggggaggtgtaatagatggataagaaacggttgaaacgagcgctgggagttgcaatcccacttgctgtcatcataatcggcataagttataacagctatattaagatgcacactttcaccctttcaggtggtgagatagtgaaaagcgaacagatacagcctgttggcggaaaggtaaaagttactggtactgctgatacagatgttgtatttacggatattgaaagcggagagacttatgtaataggttacattacttctagggtaggcgatacaattaaacttgagcgaggaaaatggtacagagtggaaggcattggagaacttacagtgagccccgtcaatgttcgtatagaataacaactcccagtttgtcaacttcacatcgggtcaacttgccccgaacttttataactaaatacccgccgcccacacagcggcacaccgagcaggaaatctgaaaaggtctcctgctttttttctgccccaaatgaggtggtaaaacgccaccccatccaccaattaccgaaaggagggacacgaaatgccctgtccacacaacgaaatcacgattgttcagcgcagccagcggcagtctgcggttgccgccgctgcttaccagagtggcaaaaagctgttctgtgaatacgaccagcaagtgaagcactacccggaaaagcgtggtatcgtccacaatgaaatcctgctcccggcaaatgccccacaggaatatacagaccgcaataccttatggaacgccgccgaagcggtggagaagcaatggaactctcagcttgcaaggcggtgggtgcttaccatcccaagagagataccacccgaccagtatgctgtccttgtccgggagttttgtgagcagcagtttgtttccaaaggcatgattgctgattttgcaatccatgacccccatccgccgggacacaatccccacgcccatgtcatgctcactatgagggcaatggacgaacatggaaaatggcttcccaagagccgcaaggtttatgaccttgatgaaagcggagaacggataaaacttccgtccggcaggtggaaaagccacaaggaggatacggttgattggaacgaccagaagtattgtgaaatctggcggcatgaatgggaggtcatccagaaccgctatctggaagccaatgaccgcccggagcgtgtggacttgcgttcctatgccagacaggggcttgatatagtccccactgtccatgagggggctgctgtccagcagatggaaaagcgtggtatccagacgaatatcggcaacctgaaccgggaaatcaaagccgccaaccgcctgatgcagtccattcggcagctcattcaaaacctcaaaggctggattaccgaactgggagaaaaacggaaagagctgcttgcacaaaaaacggcggaggaagcgacacttcttcccaatctgctgatgaagtatatggagatacgaaaagaagaacggagggactggacaagggctggacagaaccgggggacttcacaggacttaaaggcagtcagcgaagcattgtcctatctccggcaaaagggactttccactgtggaggacttagaagcgtttctggaatcttccgggaaatcagccgcagattaccgcaatcagatgaagccaaaggaagcccgaagcaaagtgattgacgggattcttgccagccggacagactgcaaggaatgtaagcctgtctatgagaagtaccagaagatattttttaagaaaacaaaggagaaattcaaacaggaacacccggaggttgcccggtatgaaaaagccgccgcctaccttgccaagcacccagatgataaggacagtacccaaaaggagctgcaagaggagcaggaaacgcttttggaagaaatcgcagagttgaaagtaccactgaccgaggtacaggaggatttgaagaagctgcgggacatccgctactgggtacggaaagccacacccggcacagaggaaagtaaagagccgcctaagaagcagcccatcaaggaagtcttgcaggataaggcagacgagaaaaaggctcaaagaaccgccccggcacaggcgaaacacagacaacaggatatggaactttaacaggcacttgccattttcaatcagagaatgtcaggtgcttttcttattttcaaggagggatagatttgaatgtatttgaagctgtgaagcagtccgtcacaacaagacaggctgcggagcattatggaatccatgtaggtcggaacgggatggcttgctgcccgttccataacgataaaaccccaagcatgaagctggatcggcgttaccactgcttcggctgcggtgcggatggggatgtgattgattttgccgccgccctgtatgggctgagaaagaaagaagccgccgtacagctggcacaggacttcgggctttcctatgaggactggaaaccgccgggaaaggaaaaaaagccaaagccccggcagaaatccccggaggaacagtttcaggaagcaaagaaccgctgcttccgtattcttgccgattatctccatctgcttcgggcatggagaacggactacgccccacactccccggaggaagcctttcatccccggtttatagaagccttacagaagcaagaccaagtggagtatctgctggatgtgctgctgttcggggaaacagaggaaaaagcggctttgattacggactacggaaaggatgtgatacagcttgaacagcgaatggcagagcttgccgccgcagacgcagcaagaactaaaaaacaccatgaacgccatgcagccaccccagagcattgaggaaatcaaggaggggctggaaactaccgagaaaggcggtgtccgtcagagcatacggaactgcctgactgtattccagcgtgacccgctgctttccggggctatcgcatacaacatcctgaccgaccgcaaggacatcataaagcccgttggttttcacagagaaagcaccgccttaaacgatacggacatgaagtatctgcttctttatctggaagaaacctacgggcttaccaatgagaaaaagattgataacgccatcgggattgtggcgaatgaaaacaagtaccaccccatccgggattatttaagttcccttgtgtgggacgggacagagcgaatccgcttctgcctgcggcactttctgggggctgacgcagacgattacacctatgaagcattgaagctgttcctgctgggtgcaatctcacgagcctttcagccggggtgcaagtttgaaatcatgctctgtctggtcggcggtcagggggctggcaagtccactttcttccgtctgctggcagtccgggacgagtggttctccgatgatttgcggaagctggacgatgacaatgtgtaccgcaagctgcaaggtcactggattatcgaaatgtcggaaatgatggcaaccgccaacgccaagagcattgaggaaatcaagtcatttttaagccgacagaaagaggtttacaagataccctatgaaacccacccagcagaccgcccccgtcagtgcgtgtttggcggcacttccaatgcccttgacttcctgccccttgaccgttccggcaaccgccgctttatccccgtcatggtgtacccggagcaagccgaggttcacattttggaggacgaagccgcttccagagcctatatcgagcagatgtgggcagaagcgatggaaatttacagaagcggcaggttcaagctggctttcagccctgccatgcagcggtatctcaaagaacaccagcgggattttatgccggaggacaccaaagccgggatgatacaggcgtatcttgataagtacaccgggagcatggtctgctccaagcagctctataaggaagccttgaaccatgcctttgacgagccgaagcaatgggaaatccgggaaatcaacgagattatgaaccagtgcatttctggctggcggtacttcccgaacccaagaatgttttccgaatatggcagacaaaagggctgggagcgtgaaaacccggcaacggactccggcaacccgtctgaaaaaacgatggacggttttgtggaggtcacagaacagatggagcttccgttctgaaaatggcagcccgttgcaccccctgttgctatcccgttgccgagccggttgccggggaaaatcccgaaactatcggcttttctcccctatgacaaccaaaacaacagaaaaataaaagaaaagtataaatagtaaccatcgccagattgagattgtttgcaaggtcttttgaagcccgttgccggacttcgttgccgacaccctctgtctggctattttcatgtatggaggataactgcctatggcaaaaaacaaaacagagattcatgttacaacggtatttgacggggaactggacgcaaccgatgtgttcgtcagcctgatttcccagaaatacggtaagacaaatacgaaagaatatcttgctaaaaggaaagatataagctataatgaagatgaggttcaaaagagccagataccgtctggattgtgtgggtaaatggctatgatgaacgaaatggaatacagaacaatcggttcggcacttgccggagggtatcgtgcagcggtctattgcaggctgtcaaaggacgatgacctgcaaggcgaaagtgccagtatcgcaaaccagcgtgatatgctggaaaaatactgcgaaaagcagggatgggaggttgtggcagtctatcaggacgatggcttcacaggtcttaatatggagcgtcctgatttacagagaatgttgagagccattgagcgcaggcaaatcaaccttgtcatcacgaaagacctcagccgactggggcgtaactatctgcaaaccgggcatttgattgaggactttttcccaagaaacggtgtccgctatatcgccatgaatgacggtatcgacaccctgcgtgataacaacgatattgccccgttcaagaatatcctgaacgagatgtacagcaaggatatttccaagaaagtccattcctcttatcttctgaaagcgcagaaaggacagtttaccgggtgtcttgccccgttcgggtatcggaaagacccggaggacaaaaaccatctgctcattgacgaggaaaccgccccgattgtgcggctgattttcggatatgccctgaacggtcatggtccgaactatatccgcagacggctggaggaagaaaaaatcccctgccccacatggtggaaccgggaacgggggcttcgcaatacccgcaccaaatgggaaaagaaagacccggaaaacgggcggtatatgtgggacttctccgttatcaaagaccttttgatgaatcccgtctacaccggggcgattgcttcccagaaaaaggactaccgtttcaaaatcggcacgattggggaaaagaagccggaggactggattgtggtggaggggcagcatgaaccgctgattgaccgcatgagctttgacattgtgcagaacaagctgaaatcccgccagcgtccggggcagactaatgaaatcagcctgtttgccggactgttaaaatgcggcgagtgtgggaagtcgctgacggtacgctacacaaacgcaaaacatccccagcagatttattcctgcaagacctacaatgcctttggaaagaaccactgcacccagcaccggattgactatgacaccctttacagccatgtgctgcggaaaatccgggaatgtgccagagctgccctgatggacggggaagcggttgctgaccgcctgaccaatacctgtgaagccgagcagcgggaacagcgggaagcaatggaacgctcccttacaagggacgaggaacggattgcggttctggacaaaatggtcatgcggctttatgaggatatgattgcagggcgtatcagtgagcagaatttcaacaccatgctggaaaagacacagaccgagcagacggagcttaaaacaaaagtgtcagagggcagaaagcggctgtccgatgaagtccagcttgccaatgacgcaaaacaatgggtggaagccattcaggaatacgccaacatcacagagctggacgcagctaccctcaaccgcttaatcaaagaaatcgtcgtgcatgagcgcattgacgaagataaaacaagacacatttctatcgaaattcattttaatctcaaacccatcccggaggtggaacaggtcactgcctgacctgtcccgccgggacggttctcttaaaaacaccacatagatttttgtacgccgccgcccgccatcgagcagagttttacacctaattggggataaaacagctgatggctggcggcggcgttgccctgatcggtatcactctggtgcccctgctgtccggtctgttcggctaattcgctctcgcaataaacacagtttgacccataagtacgccagtaaattaactctcgccgcagcttacggcgctttaacaaatggatttcagatgtgtgcagggtcgcttttttcaaaccaaaggagattttactatggaattctttaacagtgcagtggacgttctgaagactctggtggttgctctgggtgccggtctgggcgtgtggggtgctgtgaacctcatggaaggttacggcggcgataacccctctgccaagagtcaggggatgaagcagctcatggctggcggcggtgttgccctgattggcatcaccctgatccccctgctgagcggtctgttcggctgatcttttccgggcggcgtctgccgccccgtacatatttacttgcaagtgtttccagcccctccgtggcaaacggattcttatcacaagaggaaacgcattgcaaatcgaatattcacctttatactgaaaggacggtgctattatgcagattctgactcaccttatttttctgctcaacctgctcaagacccttatcaaccatttttcttgataggtggtggcgctgagtggaaacagttctcaaagcgatctcagattggatcaagtcgctgctgacagcggcgatcatgtccaatctttccggcttgtttgatgatgtgaacacccaagtgggcaacatcgcacaacaggtcggcaccaaaccatccagttttgaaccgagagtttttgccatgattgaagccctctctcgaaatgtggtgctgcccattgcaggcgtgattttgaccttcattgcctgttatgaattgattgagatgatcacccagcataacaacatggcacaatttgaacctgcgctgctgatgaaatggatcttcaaaactgccatttcggtctggatgatctccaacactttcgacatcatcatggcggtgttcgatgtgacgcagcaggtggtggcaaattccagcggcatcatcagcggcaacacacgggtgaacgacatcgggctttccatgttgcaatccagcatgatgcagatggacgtaggacccttgttcggactgttcttgcagtccttcttcatcggtatcaccatgcgcatcctgtccatcgtgattttcgtcatcgtctacggaagaatgattgaaatctacatgatggtcagtctggctccagtgcccatggcaacatggggcaaccacgagcaatcccatgttggacagaactatctccgttctctgtttgcgctgggatttcagggcttcctgatcctgatctgcgtggcgatctatgccgttctgcttcagaatgttgccatatccggggatgccatcaactcgatctggagcatcgtggggtacacggtgctgctatgctttacgctgttcaagaccggttccgtcgcccgaagcattctgggcgcacactaaggaggtggaattttggcagcttatatttccgtgccgcgcgatttcagcaaggtgaagtccaaagtagccttcaacctgaccgcccggcagcttatctgttttggtgcagcggcagtcgtaggggtgccgctgttttttgttctgcgggacaccgctggcaattccggtgctaccctcggcatgatggcggtcatgctgcccatgttctttctggccatgtatcagaagaacggtcagccggctgaaaagatcctgcggtactactttcaggcgcgctttgttcgcccgaaggtgcgtccgtaccagacccgcaattactatgcactgcttgtgaagggagatgacgcccatgattccgtttctgaaaaagaataaggacggcaggaagccgcccaagtccacggtgccccgcacggcacaggagagcattccgttccagcggatgtttgaggacggtacctgccgtgtccgtcccggctactacacccgcaccatccagtatcaggatatcaactatcagttggcgcagcaggaggacaagaccgccatctttgaggaatggtgctcttttctcaactttttcgacagctctatccactttgaactgtctttcgtgaataccgccaccgattcggcagacttcgagaagtccatccgcatcccgtaccagcaggatggctttgatgatgtgcgagccgagtacagccagatgttgcggcagcagctttccaagggcaacaacggtctgaccaaaacgaagtttctgacctacggcatcgagggcgacagcatggcgcaggtcaaacctcggctggagcacatccagaacgacctgatgaacaatttccaccggcttggcgttctggcaaagccgctggacggtacggaacgtctgcggctgatgcacgggatgttgaacatggatggagccaacaagttccacttcaactggaaagaccttgtgcccagtggtctgtccgtaaaggatgccattgcccccactgcgctggcgtttaagaacagccgcacctttcagatgggcggcatcttcggagcggtcagctttctgaatatcacggcttctgacttgagcgaccagttgctgaaggattttctggacatggattccagccaaatcgttaccatgcacatccagtccgttgaccagaacaaggccatcaaaaccatcaagcacaccattaccgaactcgaccgcagcaaaatcgaagagcagaagaaagccgtccgcgccggatatgatatggacgtgttgccgtcagacttggcgacttatgggcgggatgcaaaagccctgctgaaagaattgcagtcgcaaaacgagcgtatgttccttgttacttttctggtgctgaacaccgggaaaaccgagcaggaactggaaaccaacgtgtttcaggcagtcagcattgcccagaagcacaactgcgaattatgccgcctcgattttcagcaggagcaggggcttatgtcctcgctgccgctggcagactgccaaatcgagatccagcgcggtctgaccaccagcagcacggcaatctttgtgccgtttaccacacaggagttgttcgacaatggcaaggaaagcctgtattatggcttgaacgccctgtccaacaacctgattatggttgaccgcaaaaagctgaagaaccccaacggtctgattttgggcactcccggttccggtaaatccttcagcgcaaagcgtgagatctgcaacgcattcctcgtgacagacgatgatattatcatctgcgacccggaggcagaatatgctccgctggtggagcgtctgcatgggcaggtcatccacatcagccctgccagcacccaatatatcaacccgatggacatcaacagcaactactcggaagaggataaccctctggctttgaaagccgactttgtgctgtccctgtgcgaactggtggtgggcggcaaagagggtttgcagccggtggaaaagacggtcattgaccgctgcgtccatgtgatctatcgcaagtatttcgagaatcccaccccagaaaatatgccgctgttggaagatctgtacaacgccctgctgacgcaagacgaaccggaagcgcgccatgtggcggctgcgctggaaatttacgttaagggttctttgaatatttttaaccaccacaccaatgtggatatcaataatcgcattgtctgttttgatatcaagcagcttggcaagcagctgaaaaaactcggtatgctcatcgtgcaggatgccgtgtgggggcgtgtgaccgccaaccgcagtgccggaaaatccacccggtactatgcagacgagttccatttgctcttgaaggaagagcagactgctgcttattccgtggagatttggaagcgtttccgtaagtggggcggcattccaacagccctaacgcagaatgtcaaagatctgctggcaagtcccgaagtatcgaatatttttgaaaactcggactttgtgtatatgctcaatcaggccaacggagaccggcagattctcgcaaagcagctcaacatctcgccccatcagctttcctacgtcactcactccggtgagggcgaagggctgctgttcttcggcaacgtgatcctaccctttgttgaccacttcccgaaagaccttgaactctaccgcatccttacgacccgcctttccgaagttgcggaggcgcaaaagcatgagtgagaaacagccgaagctgagattcgaggaggaaaaggagcgcacagctacacgctcccctccgaaaaagtctaaagtggagcagtcggtgcccaaaaagcagaaactgaaacaggatgcagacaaagctgcggagaaatcccagcatctgcgttttggcaaagccgagataaccccggatgaagcatcccgcatgacaaagcagcagaaacgtgctatgtatgccgctgctgccgcccggtctgcggcacatcgagagattgatcagtacgaggacgacaatgtgggcacgcaggctttaagcgagggcgaaaaagctgccgagactacccacgatatttccaagagccgttacgccagaaagctgaaaaagaaagccaagatgcagggcaagaagggtgccaaaaccgcaaaatcttccgtgcagaagccgcctgcggcacaagatgcaggcgcatccggcaccggcgagggcagttctaactggctttcacgctggaaacagcggcaagaaatccgtaaaagtcactatgccaccgcccattcgggtacagcggcacagaccgcaggcggcaaagcggtatccaatggcaccactgctgcgaagtctggcatggaacaggtcatcgacaaaggaaaatcggtggtcagtaccgcagtcaacggcattgccaattttgcaaaaagcaacgcgcacgttcttttgatcgtgggcgtttttcttttgctcttgctgctggtcatgtcggcattttcgtcctgttccattctgttttcaggcaccacgcaggtatccgggcagaccatttacaccgcagaggaccgggacatccggggagccgaaaccgactacaagaagctggaaaaggaactggataannnnnnnnnntacccccaccgaccaccccggctatgacgaataccgataccatctggatgctatcgagcacgatccttggcagctcacttcgttcctgactactctctacgacgactacacccgcagcgaggtgcaggcaaaactcaaggagacgtttgccaagcaatacaagctgaccacatgggtagaagtccagacccgataccgcacggtagtgatgatcgacatttttactggcatcccctacaccgtgcaagtgccctatgagtatcgaatttttcacacaaagttggtgaataaaggactggaggtcgttatccgggaggaactggacaacgaccagtggaaacgctatgagatctttcaggatacgctgggcggcagaccttatctttttaatggaggcttgccgcccggtggctcggatggctccggcacaccgggcatcgactatcaggttccggcagaagccctgacggacagcgagtttgccgccatctacaaggaagcccaaaagtatgtgggtacgccctatgtgtggggcggctctaccccggaaactggctttgactgttcaggctacgtttgttgggtctacaaccagaacggctacgatgtgggacgcaccaccgccaacggcctgtggaacaagagccagcacatcagcgaggccgaagcaaagcccggtgaccttgttttcttcgagggaacctacgatactccgggaaaaagtcatgtgggcatctaccttggaaacggcatgatggtgtccgccggcgaccccataaagtatgccaatattcattcgtcctactggcagaaatatttgtccggttttgggcggctctcaaaatgattggaggaagaaatgagcgaaaaactcgataagctgcgcgcttctctggaaaaggaaagggagcgtcgcattaagatcaacactcgcattgaaagccttgaacgacggattcaggaagcagaagctgccgaggtgaatgagatggtgcgcaccgccaaggttacgccggaacagcttgccgccctgctgcggcagtcggctaccgccaccccgaccccggctgcgctgtccgcggtcggtgctacctttaataaggaggacgattccaatgaagatgatgaataaggtttgtgcgctggtgctgtcggtggcactgtgcgctggcatggcggctcccgcttttgcctatggcggtgagcctgtggaggaagtggaacagcccgtcctgacttctaccactgatgaggaagatgcggtcaccgtgaccgatgaggaaaacggtgccctgaccccggagggcaatctgacgctggtggacgattaccacacaagttactcggatggcagcggtcagcagttcatcacgctggtgtcgaagtctggcaacacgttttatttggtcattgaccgcaacgccaagggtgaaaacaccgttcatttcatgaatctcgtggatgaagccgaccttctttccctgatggaagatgaagatgccgaagcgtataccgccgaaaaagaagcggcggcgcaggcagaacaggagcgcaaacagaccgaggaggatgcgaaaaaggctgcggaagaagcggcggcatccggttctgaacagactggtggcaacaaagttacgaagtatgctgccacattcttaggcgttctggctctggtcggtttggttgctggcggcggcatttacacctttatgaagcagaagcagaaaaagcaggcagaaaaagaagcccttgaccccgatgcaaactacactgaggacaagggcgactttgaaatccctgtggaggatgagccggaggagaccggcgaggaggataacgcagaagaataattctattggcggcgtttgccgccttacatattgcaatccgaaacagattggagggattcttatcgcaaaattgatcgtggcggagaaaccgtccgtcgccatgtcctatgccaaagtcctcggtgccaccagccgtcaggacggctaccttgagggcaacggctatcttgtcagctggtgcgtggggcacttggtggagcttgcaccacccaatgtctacgatgccaagtacgtcaagtggagcatcgcagacttgcccatcctgccggaaaagtggcagtaccttgtgtctgcgtccaccaaaaagcagtttggcattctgcaaaagctgatgcaccgcccggatgtggagagcattgtgaacagttgcgattccggccgagagggagaattgatcttccgacttgtctaccagcaagcggggtgtaaaaagcccttctctcgtctatggctgtccagcatggaggaaaacgctatccgggaagggttcgcccacctcaaaccgtcaactaaatacgatgcgctgtacaatgcagcactctgccgggaacgcgccgactggatggtcggcatcaatgcgtcccggcttttttcgtgtctgtacaaccagcctttggcggtggggcgtgttatgaccccggtgcttgccatgacggtggtgcgggaagctgccattgccgcctttgtgccggagaaattctacacggtggccctgacccttgcagacggcggcaccgcatccagcaagcggtttgcccagaaagcggatgccgaactgctgctttccaaatgccgaaaggaggggcgtgttacggtgcagaagatggaacgcaaggaaaagtccgaaagccctccacagctctatgatcttactgcattgcagcgggatgcaaaccgtctgctgggatttacggcacagcagaccttggattatgcccaaagtctttacgaaaaacggatcatcacctatccccgaacggacagccgatttttgacggaggatatggcggcatccctaccggggctggtgacggacacgggcagggcgtttgccgtggaggagccgattcccatccatgtgcagcaggtcatcgacggcagcaaagtcaccgaccaccatgcgctgctgcctacgaaaagcatggcaaaagcagaccttgccgccctccctgccggagagcggaatgtcctgcggctgattgcggcacggctgctctgtgccgtaggcgagccgcaccgctatgcggaaaccacgctcaccaccatctgtgccggagaggagttctccgcaaagggcaaggtggtgctgtccgagggatggaaagcagtagagcgaaacatgctgggcgaactgctgggcaagcagaaagaaccggctgttctgcccgatgtgcaggaacagagccagtgcagcgttgccggtgcggaactgaaggaaggtcaaacgtccccgccgaaatcctacacggaagataccctcctgtcagctatgcaggcggcgggtgcagacagtatgccggagagcgtggagcgtcagggcatcggcaccccggcaacccgcgccgcaaccattgaaaaactggtgcagaaaggctttctggagcggaaaggcaccaagaaaaccaaggtgctgctgcccacggataagggaaaagccctcattaccgtaatgcccgaagagattcaatccccggaaatgaccgccgattgggaaacaaagctgctgcaaatcgaacgtggcgaaatggagccgagcgaatttatgatcgaaatcaatacgatgatctcctcgctggtaaaaaccaccgaggctgcgaaaggagcgaatgcacttatgaaaaacaaaatcattggtgtctgcccgaactgcggtgcaaatgttgtggagcgtgaaaagggctggttctgcgagaaccgggagtgccgtttcgtgctgtggaaggacaatgcgttcttcaagcgtctgggcaagcggctggattcccatgtggcggacaagctgctgcgggatggtcgggtccgcctgaaggagtgccgcagtgccaagggcaagacctacaacgccactgtgctgctgtcctgtgaagcggatggccacagcaagttcagtctggaatttgagaatgggggtcgctgatgaaggatgatgccgtaataaaagacaacgaggcagtctacctcctcaacgagcagacgtatctgcatctgcgggaaaatctccaaggtgtcgggtacgaggttttcgacaagaacagccctctcccggtggaggaagggcagattccgcgggaagctctgggcaacacccagcggcgcatcgagaccgcccgtgcgtactatctggcagagcatcaggatgaacctgtggggaggattcagaatgttgccgttaccaccttggagaagtttcgctccggggttcgcaaacgccggaatctggctccacgttctttgccggacaatgatgtgcggttcattgacccgatgtacaacgagctattccgggtgccggacggcggcgttgtgcaggtgacctaccccgatgggcaccagcgctccgaggtggtcgaatatctcggagactaccacatgaagatcgggtcctcggtaacgcacatctgcgaacttgccgagcgcatggcacgcagccatgccattgtggagccggaaccgctgacacagcaggagcagcgggcgtggaatctggaatacgactattatctcactgtgcaggcggcagataatggctcgtgggagtatgcgctctatcagggcgactgctgcctgttggagcgtgggaaaattgacgcgcccgaactgatgatcgaggaggtgcgggacgagatcctgtacagccacaacctacggaacaaggactgcatcccgctcacgcaagaggagtttacccagaaacttgcagaccgaaacgagatacagtcgtatcgcatgaagcaattccagcagagcgggcacgactgctatctggtcatgcagctgcaacaggatgcggaccctgcgctgcactttgctgccatgcgctatctgaataagcagagcatcgctccctccgttgagaattacgagatcctgtaccgaggcaacctcccggaaggaaagcgcagcgttccgcaagcagaactgctggaacaactgtaccagaaattcaacttcgcccgcccgacggattaccatgggcacagcctgtcggtcagcgatgtgatcatgctgaatcaggacgggaagatttcagcccattatgtggacagcatcggttttaaggagctgccggggtttctggataaaaagccggagcgcctttctgttctgcaaaacctcaaggagaagtgcgatgccccggagtgcaatcccacggtatgccggaaagtgagggctgaacatgaactttgaccatgaagaactcatgctgatgatgctctacaactccggtacccggatggggctcatccacgaactgcggctcatgcagtgctacctgatgcccgatgaaactgccctgcgggagctgtcggagggcgttatcgaaaagctgaaactgctgaccgatgcggagtttgccgaactggaatttcccccggactgacctttgccgcctgcgggcggcgtacataggctcttttacaatgggattcggtgtggtatactgaactcgacaaatcggaatttgtcttgactttataaatttccccgcctgatttgccccgttcattgtccagatagtacatatagcagtggtcacagccctcactgtatttgcggcagccatgccagggattccaaatatcactgctcataccgattcctttccagttcgcaaatcagactgtgaggcattcttcgtggcccacgtaccgcaccaatcccataggctttcagcttctcaaacgggagaaaagacgggttgtactgatccagctttttcaatctcatcacatggttcatatgtacgttgccatcatcataatggtaaggaatattgacttctgtagcttcgcaccgatatagaacagcggaaaccggggccgtaacatatagacagacaacatcgccaacggctacttcctcctgtttatagccttggtcagtagtttgatactatgtacgaactttctgcgtacttgctttcgttttcggataccgtacaatatttatacaatgaatcgtcaagagaggaggcaacaaggtgacttctttaaccatagaacaaaaaagagtggacatatacccaagcgcaaagccgggcagcccagttatctatctcaacaccttttccaatgccgttaacagtgtgtataaaaacctgatggcgctcggctgcccagatttcagtctggtggcggtcagtaagctgaaatgggatcatgacatgacaccgtggtatatggggccgatctctaaacacgatacgccctgcaccgggggtgcggatgattacctgaaactgcttctggatgaaattatgccggaagcggaagcactccttcccggtgcgcccgcctggcggggcctcgccggttactcgctggccgggctgttcaccctctacgctctctaccaaacagatgtgtttgcccgcgcagcgagtatgtcaggttccttctggtttgagggcatcatggaatatgtgtgctcccatgagatgaagcgcaaacctgactgtctgtatttttctctcggagacaaggagagctccaccgataatccgattttgaacgttgtgcatcagaatacgcaggagatagaaacactgtgccacgggaaaggcatcgaaaccaccttcgtactgaacagtggcagccactatcaggcgtgcaacaagcgcacagcggctggcattcactggatattaaatagataaaccgacaaggagataaaacgatggatacgatttattcgctttttcagaaagtagttaaagaacatgaaaatgccccggctatcattgaaaacgaccgcaccatgacttttggagagctgtccaacatggtggatatgatcacgtgcagctttccgcaggaagtacacagcatcggcatcgtcatgcgtcaccgaaccgagatgattgcctcgattctggcggtactcaaatgcggcggccgatacgtcccagccgagccggattttcccaccgggcgcatccatgacatgatgaccgaggcacaggtggattttgtgctgacggaacacgcctttgcgcccaaactgaacagtttccccatccgctatacagattgtgagatctgcggcgtggagacgccctcctggaagcgcaacgccgtggaggacccggaacgccccgcctatgtgctgtatacctccggcacgaccgggcggcccaaaggcgtctgtgttaccaaccgcaatgtctgccactatgtgcgcgcctttgcgaatgagttccaccccggccccggcgatgtcatgctgcaatattccgtctgttcctttgacatctttgtggaggaagtgttcaccagcctgctgaatggcgccgctctggccatcccctctgacgaggacaaggccgacatccatgcgttgatggcttttgtggaacgccaccatgtgactatgatcagcggctttccgtatctgctggcagaaatgaaccacctgtctgtcattccgtcctctctgcggctgcttatcagcggcggcgatgtgttgcggggcgtttatgtggatcacctgctggacaaagcagaggtttacaacacctacggcccctccgagacaacggtctgcgcctcctattaccgttgcaatagtggaactgtgttggcggacggtacctatcccatcggtcatcctgtactgggtgcgcagatcaggattctggatcagtctggcaacgcggttgccaaagggcagacgggtgagatttgcatttatggcggcggtgtatctctgggctacattggcgaccatgccgaggaaaacagagcttttgagcggcagccggacggcagcaccatgtaccgcagcggcgatttgggctatatcctgccggatggcaacattgcattcctgcaccgcaaggacgaccagatcatgatttacggcaagcgggtggaacttgccgaggtggagtcccggctctatcggtgcaaggatgtgcagcaggctattgtccgggcttttaccgacgaggatggactgtcctatatgaccgcctatgtggtgccttccgacaataagctgaaagtctcggaagtaaaaaaagaactgtctgaaaatctgacttcctttatgatcccagagttctttgtgaagatgaagcagattcctttgaatatcaacggtaagccggatgtgtcgaaactgccggtggtaatgaaagcgggggcattataatggagattcagatccggcaggccacgatccaggacctgaatgtattgatgcaatggcgaatggaagtcttgcatgaggtattctccatcccctcggagcggtctgtaacagagctggaatcggaaaatcgccgctactatcaaacagaactgccgcagggcggacatattgcctgctttgcctacgtaggggaggaaatcgtcggctgcggcgggatatgcctctatcatgagatgccctcaccggacaatctaaacgggaaatgtgcctacctgatgaacatttatacccggccgcagtttcgcggacacggcatagggaacagaatcgtcaggtggcttgtagagcaggctcgtcagcggcatatttcaaaaatttatcttgaaacctcaaacaaaggcaggccgctgtatcaaacaatcggttttgccgatatgaaggatatgatgaaactgtcccgtgaaaaataagcaaaatcaaaggagcatacatacaatggagccaatcatctgaaacgttgaagtaaaaagcgtcctcacaaaatccaatttacctgtgagtgattattcggtcaattcttatgtgggctgtggccacggctgcaaatattgctacgcatcttttatgaagcgttttaccaatcacccggagccctggggagagttcatagacgttaaattttggccggaaatcaaacacccggagcggtatgcagggaaagaactgtttctctgttacgtgaccgacccatatcagccgctggaggaaaccgtctgccgcacccgcgccattttggagcagatgcagggcagcgaatgtagcctcagtgttgctaccaagtctgacctggtgctgcgtgaccttgacctcattaaaacattccccaatgcgcgggtatcctggtcgatcaaacacactggacgaagattttcgcgctgatatggacaatgcagtgagcattgagcggcggctggccgctatgaaagcattccatgatgctggtgtgtgcaccacctgctttatctcgccgattttccccggcctcaccgacctgccctccatcatccaccgggcgaagaatcaatgtaatttggtctggctggaaaacctaaacttgcggggcggttataagaaaacgatttttgactatataacggaaaaacatccagacctgctgccgctgtacgataccatttacaataaaaaagaacgcagctactggtcaatgctggatgcgcagatgcggcagttttgccaagaggaagggctactgtatgtccgggatgatgattccatcaaacgcccgttcaacgatccgcctatcgtggtcaattattttttcaacgaagagattatccctcggccaaaatgcagaagaacaggtaatcaaaactatatagtaacatgcagaaagctagaagttgtagaggtgaggttatgaaacgcgcagaattagaatcagacatataacgccgagacagattatccgtggctcaagtatccgaattatgaggtgttccggcattgtaataatcggaagtggtttgctctgattatggatgtaccaaagaacaagctggggctgcaaggcgaagaaatgctggaagtggtcgatttcaaatgtgacccaattctgattggcacactacgagaggagcccggcttcttcccggcgtatcacatgagcaaggatagctggattactgttgcactggatgtgcagcgtatcagatgacaaaatcaaaatgttgcttgatatgagttatgaagcaacgatacccaaaacatgcaaaaagagatactgataaattcccgtttaccacccaagaacatccatgagagaggagtgaccgttatgaaggaaaacagaaaactattaaaagaagtgctcaaggacatccggcacgacatgaccgatgaggaagtgctgaatctgctggcagacagtaagatctccgtcagtcctgaaagcgaaaaagaaaagtatacgctggggcagcgtgcagcagattccattgcaaaatttgccggaagctgggcgtttatcttttcctttaccggtgttctgattctttggatggtggtcaacacggtgctggctgccaaagcgtttgacccgtatccgtttattctgctgaatctggtactgtcctgtgtggcggcaattcaggcaccgttgatcatgatgagccagaaccgtcaggaggaaaaagaccgccgcagagcggaaaatgactataaagtcaacctgaagaccgagatcatgatcgaggacctgtacgataaagtaaacgccattcttgccaagcagtccgcactggaaaagcggctgcaaaacgatggcaaaaatcatacaaagcagcaggaaaacaactgaatcctagcttttttgcgccaaaatgggataagccggaaagaaaacggtgtgcgattccatctcccggtgttgatttttgtctcattgtggtaatgggggaaagacagatacaagatattgttgcaaaagtattattttttcgtgaatattagcactctgctattgacagtgctaaaatgcagtgctataacagtggcgtgctcaggaggaagggaaaaaggagagccgcaagactccccggaaagctcttccgagtggacgcttcagattttttgccccgacccgaacgccgggattggaggaatgatttatgcttatgccgactgttttccatgaaaacctgttcgatgatttcttcgatccgttctggaatgacgctgcactggaacgtatgatgaaccgtgaggctcgtgatacctttggtaagcgtggtgcaaacatgatgaagaccgatgtcaaacagacggacaacggttacgaagtagctgttgacctgccgggctgcaagaaggaagacgttcagatggatctgaacgacggctacctgaccattcaggcagtgcgcagccacagtaatgacgaaaaggataagaagggccgctatctgcggcacgaatccttctccggcacctgcgcacgcagtttctacgtgggcgatgtgaagaaggaagacatccacgcaaagttcgaggatggcgtcctgcacgtcgagctgcctgctcctcagcagacgaaggctttgcctgagaacccgaatctgattgcaatcgagtaaaacgccggtcgtgtgcgccaaggcacaacgcacataagatgcccccggagagccgcaacaagccctccgggggcattttttgtttcccggtatttttccgcagcggcaagccttcgtcaaaactccgggtgccattcatcccggatgccaatgtcagcacagatgatttttccgcacagcggcgcagaagcttctgccatatgcaaaggcttataactgtcgaaggttacggtcaaatctgcataggcagcaccctcggcaacctccccggtatccgtgttgatgccgctgggcaggtctacagccagcacaaaggtgtcgctcttatgcagacggcgtatcagcccgcaggcagcaagaccggaaggccgaagtgcaccatggaacccggtgccatagagagcatagccaatggataccacaaaaagatcacccatcgaccgtctgctggagatggcagaaaagtttgccgcaaaacacgaataaactaccatagattccataagcgagtgacctgaaaaggccgctcgcttttttgtttacaacgagattgaagggaggaacgctatgccaagcaaaaccgaagaatatctcgcccttgcccagcgcacggccaacggcttgacccggtactgggaaagctggacggactacctgaccactgcatcccgactgtacaagtacacctttgcagaccagctgatgatctacgcccagcggcccgatgccaccgcctgcgccgactatgacatctggaacaaccggatgaaccgttatgtccggcgcggttctaagggcatcgccctgctggatgaatccagcggattcccgcgcctgcactacgttttcgatgtgtcggacaccggggtgcgccgtaattcccgtgaccccgacctgtggcagtacaacgatgacctgaaacagccggtttcagaaatgctcgccgccacctacggcatcagcggagagcgtgtcagccagcagcttgcggatgttgccgggaaactggtggcggattactgggacaacaacagcgaggacatcagcgccatcgttgacggttcgctgctgatggattatgatgaagccggggtggagatgcagttcaagtctgccgccgccattagcgtcacctacacgctgctggaacgctgtggatttgagccggatggctattttgacaaagacagttttcaggccatctacgatttttctaccccggacactgtctacacactcggtgccgcagtcagcgacatcagccgcgaagtcctgcgcaccgtcgagcgggcagtcaaaacgaccatccgccgccgaaacaatgaaaggagccagcatgaatatgagcagcaatctgaactacacgcagaccggggattatcttctcccgaacctgaccctgcatcagccgaagaccccgctgggcaagtacggcaggatgcgcctgagctttctgaggcagcagcacccggttctgtaccacacgatgctcctgaacgggagcctgtacccgaccctgaccgaactggagcagaccgcagcagcgatgaagaagcaactgatggccgatctgctggcgaagaacccggccccggacaaggagaagaatcagatggcgtgggtacagcacatgaacagcctacaggagcaggtcgaggaagtgattcggacggaactgatctacagctaagttttctggatgccgtcatccccaccgaagcccagcaaattgaacatatcgaccgagcggagagcgaaaaatcgccctccgcttttgttttgtcgcaggctgaaattgagaatgaactgcgcaagcatggttccggttttcaggatggcaagcagcggatcatcgaactgtaccagacacagcccgaccgcaaactccgcgctaaagcattggcgaaagagtacggcatcggcggacattcgcaggattttctggatggcagcagcggttttgtaaatcatgatggaaaaggacttgaatttgaccactacccggatcatcaaaaggttacgttaagctggacacaggtcgagaaatacatcgacctgatgattcagtctgaccgctacctgaccgataaggaaaaagagcatcgtgccgccgtgcaggaagcggaacgacagctcccaatgctggatggtgatgccgctgccgaatacaatgctctgaaagagcagtaccccaataccctgattggctttgaactgggcggatattttctgttctatgacaaagatgcaatcactgtaaaggaagtttttcgttctaatttgctgtcacaggaaaatgcgctgggaaaagtcaaagtgaccggctttttgcgcagagagtgggtagcaaaatcgcagaagctgtgggccgagggcaacagcatctatctagccggacagggcggagatggtacccaccatcagacaaaatatctgcgagaggaagattatctgccgatcggcatcatcatcaagctagatggccgggatttccgtgtggatcacgtcaacttcatgttcaaatccgtcagcttgcaggacatggacttgaccaacagcggacagcccatcttccgggttgaacggttgcccaatatccgggaactgtatgaacagcagcaggatgaaattattgacgtttctcctgaaaaggctgttgattacaaggtcggtgacgaagttgttgttgaccttcccacccgaaccatcgaaggcaaaatcggctatgttggcgaaaccgatgtgcgcatcgacaccagcgcgcatgggcagtcgtgggataacgaggtactcaacaagcagcaattcgaggacggtctgcggcgggatgaacctacacctgatgaggaactggacaagttgcctatctctgtggaggtcaatggcgagtggcagacctttccggatgctgctgccgcagacgaagccctgaacgctgaaccgatgccggaagccgcaggaaattttcacatcacggatgataatttgggtgtcggaggccccaagcagaaattcgcccgcaatattgaagccatccagaccttgcgcactttggagcaggagcatcgcggtgccaccgccgaggagcagcaggtgctttcccagtatgtgggctggggcggtctggcagatgcctttgaccctagcaaagatagttgggcaaaggaatacgccgaactgaaaggactgctttccgaggaggaatacgccgcagcccgttccagcaccctgaacgcccactacacctccccggtggtgattcgctctatttatgaggcggtcgagaaaatgggcttccagtctggaaatatcttggagccttccatgggtattggcaactttttcggtatgctgccctctggcatggctgacagccgtctgtatggtgtggaactggattccatcaccggacgcatcgcccaaaaactatatccacaggccgacattacggttgctggctttgaaaccaccgaccgccgagatttttacgaccttgccgtaggtaatgtccctttcggtcagtacaaagtcaacgacaaggcgtacaacaaactgggtttttctatccacaactactttttcgccaagactatcgaccagatccgaccgggcggcgtgattgctttcgtgaccagccgtttcacgatggacagcaaagacagcagtgcccgcaagtacatggcggaacgtgctgatttgctgggagccatccgcttaccaaacaacgcttttaaggcaaatgcaagcaccgaggttgtttcggatatcctctttttgcagaagcgtgaccgccctgcagacatcgaacctgcatgggtgcagctggggcagaccgaagatggcttcaatatcaatcagtattttgtagaccatccggaaatggtgctgggaaatttggaactagaaagcacccagtacggccatgacctgaccgttgcaccaatcgaagatgcaaaccttgcagaccagcttaccgaagcggtgcagcacatcgagggccagtacactgcggtggagattgccgctccggacgttgccgatgcggaagtgcagcgcaaaactctgcccgcagaccctaccgtgaagaatttcagctatactgtggtggatggtgaaatctactaccgcgagaactccatcatgacacagattgaactgtccgacaacgccaaaggccgtgtggctggcatggtggaactgcggcagatcgtcaacgagttgatcgaccagcagttgaatgacttcccggacgaggatatcaaggcatcgcaggcaaagctgaattatgcctacgatgcgtttactgcaaaatacggtctgatcaacgacaagaaaaatgcccgtctgttcgatgatgacagctcctattatctgctctgctcgctggagaatctggacgagaataaaaatctcaagtccaaggcagatatgtttaccaagcggacgattcggccagagcgtgttgtcaccagcgtggatacccccagtgaagcactggcagtgtccatcggggagcatggcaaagtagacctgccttatatggcagaactgctgggcactcccggtaactatgagcgcatcaccaccgaactctccggcgtgatcttcaaagatcctgccgccgatgcagacgacccggaagcaggctggcagactgcggacgaatacctttcgggtaatgtacgcgataagctgcggatggcacagcttgctgcggaaagtcacccggagttcaaggttaatgtggacgcactgaccaaggcacagcccaaagatctggaggcatctgaaattgatgtgcgtttgggtgccacttggcttgccccctccatcgtgcagcagtttatgatggaaacttttcagccgccctatcgtatccgctacaacaatgccatcaccgttcgctactccccttacacttccgaatggcggatcagcaataaatctgctactggctttggtgacattatggccactgaaacctacggtacccgccgagccaacgcttacaagattttggaggataccttgaatttgcgtgatagccgcgtttatgataccatcgaggaggatgggaaagaaaagcgtgtgctgaatcaaaacgatcgccttggtgggccgttacctcaccaactagctaatcggacgcgaggccatctcaaagcggattgctccttttccctctacccgatgccgggtcgtgggcttatgcggtattagcagtcgtttccaactgttgtccccctctttgaggcaggttcctcacgcgttactcaccccgtgggcttatgcggtattagcagtcgtttccaactgttgtccccctctttgaggcaggttcctcacgcgttactcacccgttcgccactcgctcaagaaagcaagctctctctcgctcgttcgacttgcatgtgttaggcgcgccgccagcgttcgtcctgagccaggatcaaactctttataaatgatatttatcacttaaaagtgttaaatcttgtttcgctcagcacgcaatcgcttgcgtcctgtgtgaattactttctccccgtccagcagcacccgcaaaatgcgcagcgcgtagtccgtctctttggtgatgatcatgctccacatcctctttttgcttgcttgttaataccatcatatcaatcttgataaattttgtcaagattatttcaaaaaaaatatcgctttcatacagaccgccccagcacgggtcagcttcgctttccattcagcgaaaagccatgttccttttcatattgacaatctcctgattgggattgagcttgattttcatgttcgccacctctttcttgtttattgattatggctttatcataccgcaggacaaagtctttttctgtgacgaggttacattgataaaaaaatccggtgctttttgagcaccggattttaagaaggtgaattacgctttccacagactgtggaggttgcagtaggcgtagaccgcctcgacctcatcgccctcgcagagagcgaagcagacctccggcttttcgccgggatgcagttccttacgctgattgccctgcttggtctggagagatacccattcgatgtagtgctccggcagcatggggtgctccacggagccgaccttgacatggacgatgccgttttccactgtccagacagggacgtgcttctccacggcggcgtcggtggtgccgggaacgatctcgctcatcggctcgccgcagcagacgatgggcacacctgtgtctttgaccttggcgatgatgttgccgcaatgcttacaaatataataccttacttccatgcctttttctccttccatgtgtaaaatttataattcaattgtctccattatctttttcaatgaatctgcggattccttaagctttaacgcttcctcgccacttaaattaataggtatatcagactcaatgccatctgcacctacaatagctggcatacttaacgctactccgtcaatatcatatactccatgaatcatgtgtgatacaggaagtattgatttttcatctctcataatcacttcgcatattctttttacagacattgcaattccataatatgtagcgtgctttttatttataatttcataagcactgttcttgactgctgtagctatttctgccgtgttttccttgtgcttgtaatgtccacgcatttcacacatttcacttaatggaacaccagatacattggctgatgaccatgctacaacttcgctgtctccatgctcacctactatgaatgcatgaacactcctgctgtccacagataaatgctcaccaagcttatatcttaatctggcactatctaacacagtaccagatccgataaccctgttttccggaagtcctgataactttatggctacctgagtcaggatatctaccggattcgcaactacaagcatgatacctgcaaaatttctctttgctatttcaggaatgattgacttaaatattgatacatttttatttacgagatcaagccttgtctctcccggcttctgtccagctccggcagatatgataactattgcagcatcagccacatcatcataatctccggcatatattttcatcggactcgcaaatggaataccatgactgatatccatcgcttctccttctgccttgttcttatctgcatcgataaggacaatctctgtaaacaagccactctgcatcagagcaaataccgatgcagaaccaacaaagccacagcctatcattactgctttttttgaattaatcattttatacattgctttcctatccatatttttccttcttcaccttctcactgcatttcaggcaaattcctttaaacgaaatatcataatccaaaaattcaattccatgagtgttatgaattctttccagtaaatccggtatttcatccatatccacatctgaaaccgcaccgcactttacgcacctgacatggtaatgatttttcaatgtaaaatcaaacctatttggtccatccggaacttcgactttccttaacgaaccctcctctaccaatatatcaagatttctatatacagtgccttttccgattgtaggatatgcttcttttataaattcatacacttcatttgctgtaacatgccttttcatctcatatacagcatttcttaccagatctttttgaatggtatttcttctatttatcatccgccctccttattaggatttattcctaataaggattatacattgtttcaagttcaatgtcaagagaaaatagtaataattcctattattataataaatacccttaccgagcatctttcatttaagaaattattctatttttcgttcaaaaacatattctgtagctgatgacaaatcagaccggaaaaaatagccaagtttgtcaaatttctgaatctccactggattctcaatattattttctgccatgaatctgaccatttcaccacgagccatcttggcatatgtaccttttgttaccagtttatctccggataactcacaaaatgtaaccgtaatatatctatcctgcggtatcagatacttttctatacattttgagtattcttttgatgccagattaatgataatcctgctgtcatcgattactgagcggtataacaagtctccccagtactcatacagattttttgcatctccaattccgacctttgcctgcatttctaaacgataaggtgtcacaccatccattggtttcagaaccccataaaatgcagacagtattctcaaatgattttgcacatactcaaactgcatatcttcaaacacagatggtgccatatattgaaaagcaattccttcatatgataaaacagccggagtgagcatctgataaaggttcatattttccagtctattgaagttctgttccagaattttgtcattacatttccagatagctttcagttcctcttttgacctatctttcaaccagtttaatatctctgttgtcttatcaataaactccggtaaagtaaccggtgctatgctgtcagtatctgtaatcatcttctttgcaggcgataatataatcttcattaatctaattccttgagcatattttcaggatcatctgcagccttgactttatcatttgcctttataataatcccctgttcatcaataagatatgtggttcttactactcccatagagactttgccataatttttcttttctttccagacatcatatgcttcaataactttacgctccggatctgctaatagcgtaaatgccagtccgtatttttcttcaaatctcttgtgagacgctacagagtccttgcttactccgagaataacagctcccttctcagtaaactgtggataacgctcagaaaagccacatgcctgcttcgtacatcctggtgtattatcctttggataaaaatataagatcactttttttcctgcataatcgcttaatttatgcacttctccgttctgatccagcaattcaaaatccggtgcttttattcctaactctaacatttactattcctccgcttttgtatttttcacctgttttcttgttcttttattaccagaaatcattttatggccagaatagactgccatcatcatgcatatcagagagccaaatgcaaagtatttgtgtgctgcttttaaccctttatatcctgtataaaaagttccaatcattgtgattaaagctcctactgaccaatatttatgtgctttcatgtaattcctccattttttcagtatattcaattccaattatacgctacctcattcctatgtcaatttgataatagcgcattcctataaatttttcagaatatcatggttaaaactatgtattgttatcctataatttttctttgaaaatctaaccaaaagctcaccttcaggaaattactatttaatctcttttccacctatatatagttgaaatttatcaggattattgacaacatcatagtcctttccgtattctacaggtctatattcggctgtcattaccgatttcccgtcttcaatatcctctttccataaatagatgttcatatcaaggctcgtcgcatatcccctgtctgtggaaaattttgtcgaatgaaaagaattatccttgtacttgctcttcccagtttgtcatattactcttccaataatgtatgaattatcttgataatttttttctgctctttgatcggaagtttttctattttatctgtcatctcattggtaacacctgtaattgagtgtgccacaacatcaatcaaaagagtatctgcagaaacatctaatgcatttgcaattgcaacaaatgtatccaattttgtaactttcaatcctctctctattacactcacatgcgtcggacttaaatttactaatgcagccagttcctcttgcgtgagattttttgcttctcgtgctgatttgattcgctgtcctactgctttcaaatccatcgtaacacctcctccagaacgaataattgttctggatttaatatacttgtggatatcttaaatatacagaatcacaaagccaagttctaattctacagaactacatttcaagattttctttacatattcgtaaaaaagtgttatgcttgaagcagttaaatcaaaggaggtatcaaatcatgaaatctcataaatactggtccctaggcgcacttttctgtatgttgggatgcatttattctggaatcagaaaatctatgactgcacataaatactttgcctattcatcattgctttgtatgggcatgtctatttattccggtcacaaactggtttctccaaagaagaaaaaaatcactgaatcaaacaatagtgaaaataattgaacaaaaattgacctttattcatcaagtcaaaaccaccggctgagccggtggcttgagtaagccctagaagggcaccttactggcaaagcccctgcaagggaccacgagcaaacatctttcacctgcgttacttgccctaccgctctaacgagcagtgtcataaagtgcatcttccaaaacgatgatttgcttgtcatctcgctttgctcgaatcttgtagctaaagcatttttactccaccagcttggctggtggttgtcgctcgctcaagctacccaacaacagcaaaaatgcccaccagcttcaagccggtggacattctcttacttgtaccgtattacaggcagttgctttatcttgcagccaacctttttgtgctcaagtgcaaaaaccatatctggagtgcgttcaaagaaccctatgtcacgtttccagcttgtcccacacttgcaatggaacagcccaatgaactgctgtttcatcttgcgcccgcagtttgggcagatatgtttacttgcacccatattgcattactggagtttggcaaggatttcctcagtcgtcataccgctggccagcagcttcttcagcacatcttctgcttcgcctttctttgcttcttctgctgcctttgcttcggcggcagcttttttattttcggctttggtaagttccttggtggcggctttcaattctgctttcttgactttcagctgcgttttcagatcatcgagatttgcagtcagcgaggcaacctcagattcgattttttccttttcagcagtcttttctgcaacgacggctgcataatcaacggcagcttttacggtacgggtcttgttcttgcttcccttgggtcttgccatgataatgtcctcctatacggtgaaatgatttgatacttataagtatatttccaaatagtcagaattgcaataggtaacctgagccgttttcaactgccaacgcaaatcttattcggtatgtccgaaagtcgttgcaaatgtattccttcaatggtaatgatcatggagattacaactcaagggctactttgaggcaaaatgcggcgctgatctgtacgacgtgctgggccacccggagctgaaataataccaaaacaacgagagggccgttccccggtttggggagcggccctctcgatctatgctgttatatcgcgttttgctgtgccgtcaaagcagcttcaggcggcgggcggctattgccgcccggtacatattataataaggaaagccatagtaacgatctcacattccagaatgagttggttggtcctgtattgaattcctggattataccaccagacgggagctcacacatcaaagtccagatctacttccagggttcctgccaagtcgcctccgtagaatgtacacgcagtctttaatgcctgcatggcaatctctttacagctgatatccttaaaatagcaatgtttttcatagatgcagcttgcgattgctcttccagaatctgtgagaacaaagtcatagtcctgattcattttgagaaatccgttcttttttaatagagcaactgcatgactaacgatcgctttagatacattcatgtactcagcaacctctactgaacgaactgaaccatgttgcgcttcaagaataaatatggcttttagatagtcttctccggaagaatgaagtctttcttttgcagccgcctcagccacactgctggacattatttcacatgaacagatgcaatgtctacgtagctggcatctgtgtagaagtcatagccagttatcttatcagtattccacagagccagatcgtgagtgccggttacaggcaccagaagattctgatctgcaataccattcagaatcattccatagatttcctgcacacgctgagaatcagaagtggagtccaattctgcgaaaatttcaggattctcaaagaaagcagagaactggcagaggatcggatcacccatagcgccaggagccatattgctcatatccgttgcagggtcaaaggaaccgccagcagtattgtagaaggtcagatcatattcgccagccatcaagtctccataccaggtgttcatgtctactgcatcaatagtaacatcgaagccgagttctttaagagaagctgcaatagaaagaactgcattgtcaatacttgcaaggctctgagaatagttgaaatgaatggcaagagaagttccgtctttctccaggataccatcatcattggtatcctcatagccggcttccttcatgagctgctttgccttttccatgtcagtaggataggtcttaacctccacaccgcagttgggcttttcattcgtaaagagggtttcggcagcggtctccaggccatcgaaaacagaggtttccaactcctgctgattaacagcgtaggatactgcttcccttacaagaggatcattaaagggagccttattcaggttcatacccagataacgggtttggttggtgctgtcatccatggcatgaccgaaagcggtatcctgggaaatctccgtgtagccttctgcgctaagtctgctggagccgagaattgcatcgatttcaccgttgcgcagagcaagaatttttgcagcattatcaggaatcactttgaccttgaactcatccacttcaggagcttcgccccagtagtagggattgcggataaaggtataagtgtccccctcgacccggtcaaacatatagggaccagtacccatagttgcactcacgcaattctcgtaagccttttctacgccgccttcaaaggctgcgggattcacaataccaagaggcagcgccatggtcagattgtcaagagcagcgtaataaggggtcttcaaagtcattacaaaggttttttcatccggggtttccagcttgtcaaacaaagtagtaagcttaccgaaggcaccattctggggacccagattggttactactgcttcaagggtcatctttactgcctcggaagtcagaggagtaccgtcagaaaatttgacaccatcacgcagatggaaggtgtaagtcttgccgtcatcactgatttcccaggtttcagccaactcgccctggatcttcccgttatcatcatagcttaccagagtgttgtaaaaattacgactccagaatccggcaccgtaagtgctggataccataggcgtgataacaggatagaagcctacagaaaagtcccaattctcggtgacagtgattgataccggctctgcatcggtctgagaggtggattcctccggattctcgtcagggtttgtgccgcaagctgccatagcaaggcacatcacaagtgcgagtccgaaagctaaaagttttttcagtttcatgtgcaaaatctcctttatttgtttttataacatgcttttcagcagggtatacatatttattgaatggtttagcccagatatggagcaatagaatgcagcagaagctttgtatacggatgtgtaaagcagtctgttgaaccgtgaaatgtacggtcttcgataatcttaccgcaacgcatcaccatcacacggtctgcaagatatagcgcaacatccaggtcatgggtaatgaaaaagcaagtcatttttcgctcctgatggagtcgcttcagcaaatcaagaatatgtttacgaaccaggacatccaacccactgactgcttcatcaaaaatcaatacatccggttgagcagccaacgctcttgcaatacatacacgtttttgttgtccaccggatagctcatgagcttttcgcagcttgatttcttcgggaagctccatcatggcaagaagatcattgatttcccgttcttcttcctttttggtgagttttctgaaattgcgaattggctctgcaatgatttgatataccgtaaagcgagggtccattgctcccttgccatcctgaagaatcagctgtattttagatcgcagtacctgcttttgtttgccccggcagagggaaatattttttccttcaaacagtacctcaccagaagatggaaccagcagaccgcacatgagctgagccaaagtgcttttaccagatccgctttctcctaccaaagcgcaaaatgaaccatcctgaataataaaatctacatgatcaacgaccagaagctcgttgtttgtgccttgttcgtgaaattcttttgataagttgttgactttaatcatgattccgcccctttcgtgaaaacacaggaaagggagtaagcttcaatcagtgactttgtataaggttctgtggtatgatcgaagacaaattgaacttcaccggattctataattcttccttctttcatcaccaacatgtttccgcctaattgaagagctgttgcgaaatcatgagttaccataagaatcccaactccatttgctttcatctgcgaaaataaatctatgattccatttctgtgaatcacatccaaagcagttgtcggctcatcggcaagcacaaattttgcatcaagcatcatagccattgcgataatgacacgctgaagcattcctccggaaagcatatgggggtatgctctgtataccctgtcaggatcatctaaccctacatcatgcagaagctgcagaatatagttgtaacgctgctggcgggatttgtcggaatgaagctgtagtgtttcatccatctgtctgccaatacgcatagaagggtccaatgcagtcattggattttgcgggatgtagacaatctggtttccgtatattcctcgtctctgcttttctgatgaattcaaaagatcagtttcgccgaagaaaacggaacccgacacctcaaattttttagggcccaataagtttagcaccgcactacaggtcattgttttgccgctgcctgattggcctaacaagattaaagactctccttctttgattgcaaaggatatttcagaaaccaagttatccgagcctgaccgcagtttaatgcttaaacgatcgattataagtgacgacatcataggctgtcctcctccggtgtcaggatatcacggagtgcttctccaaacaaattgaagcctgctgccgttacgaagatgcacaagcctggatagatcagcaattccggatgagagtaaagcgctgtcctggcatcatttaacatggcaccccattccggtgtgccggagggaaggccaagtccgaggaaagcaaagctggaaaccataatgatggaagaagcgacaccagtggaaacatacacaagaaactgtggcagaatgttaggaatcagatgtctgaagatcagctttcctgtattgcacccagaaatccgggctgccaggatataatctttacccatttcttgaacggaataagatctgacaacacgaacaaaccaagcccaggtcgctatcacaacagaaacggcaatgttttggagtccgttccccagaacgcctatgacagcaatagcaatgataagagaaggaaaagcaataaacacatcacagagtatagtaatgaaatggtctgctttttctccagcacaggcgctaaaagtaccgacaatcagaccaatcacagacaaaatcagcagcaccggtaaactgattccgatggaatatctggctccatacagcagccttgataaggtacacctgcccaattgatctgttccaagagggtattctgcgtcaggctgtgcatacttttgcgataaattcaccaattcagggtcgtgaggcgaaaaagcaggtgctgcaatcgcaatcacaatcacaatagcaatcaggcacagaccgatgattgcctgcggccttttgagtagcttatgtatcattttcttccctcaccatccatggacaaagcagacggttgattatgtctgccatgaaatttgcgacaacaaaaattgctgcaatgacgactatacaggtagaaactgcaatcgtatctgctgcaaccacactgtccaccagataagttccgattcccttgattgaaaaaacactttcgattacagcccctccggcaattagaaagccgaattgctgaaagaaaattgtaacaacaggcggtaaggcatttcgcagaatgtgacataccagaattctgttggcagatagtccacgggcttttgcaaaccgaacataatcagaagataattcagccagaagagaggaacgcataattcggatgagtgaacacgaactgggaaccgctagggcaaatgaaggaagtaaaaagcccctccaacctggacttggtaagacactgaaccatttcagatgaatcgcaaagaacagtagaagaaggaatcccagccagaaagttggcacacaaataccgcagatagtaatgcctctggtaacctgatcgaaaaggcggttccgctttctggcgcagagcaaactgattggaacggtgagtacgataatccatagaatagccatccctacaagagatgtggtcgtagccagatacttgtgcagatcctttacaatcggttgatgagtggtcaaagaagtcccaagttctcctgtaaacattccggaaagccactgaatatatcgcacagggagaggttgatccaatcccatttccacccgaatcatctcaatctgttccggcgtaggattggatacgcctcggtgtgcaataatttctgcaggatcttttccggaccaagcaatcaacaaaaaactcaggacgctgactcctatcagcacaatgaggaagctaatgatcctttttccaatatatttcttcaaataatgcacctcctcacgctggcaatcagttaggcatagttaactaaatgcctttaagttccccttcagtgcggcctgcatctgaaaggcaacctgcttagtagttaaatttctctgccagattggacttttctatcatctttctatatgtggacgactgtttcagcagatgagcatgctttccgcaggcttctacggtacctgctttcataacgacgatcttatctgcattttcaatagactttagtctgtgtgaaataacaatcacggtcttgccttgaatcaaatgatttaatccagtctgtatctggacttctgtttccacatctaacgatgcagcaatctcatccagaatgataattggagcatccttcaggattgctctggcaatagacagacgctgacgttctccaccggagagtttggtaccgttttccccgattattgtctggtatgtgtctggtagacggctgacaaactcattgcaaccagccagttttgcagctcgtattacttcttcgtcagaagcatccagccgcccaaggcgaatattttccataatagaagtattgaatagaatgacttcctgaaaaacaatggagacatacttaaacaagctatcagtgtgaatttctcgtatgtcggttcctccgatttgaacggtgccggaatctgcatcatatagtctgctgatgagcttaagcattgttgtttttccgcagccgctgggaccgaccaatgcggttacttgtccttgctccgccgtaaaggatgcatggcgaatcacctgggtgtctttctggtaggaaaaacaaacgtcctttatttctacattgaaatctgagaggactgccttttctccaccctgaagttcatgattcttgatttcaccaatcctggcgatccttgcatccaaataaaagatttccgtcagatagagcaaaacaccacccatggccccgctgagtttcgccgccataataatatagcccagaagaatcaggatacttacctgaccggaggcaagcatcgaaaggccaacagttgccgtgattccaataggaagaatcgataaagtctggccgattgtaacaggaatcgtctgggtgatctgggctttccactgaagattttctgactcatccaactgctggtccatttgagcttctactttttctttcaacccatagcttttaatttcctgattcagttcgattgcattctgaaagctttcggaaatatctctcaacttatcataatgtttatttacatctctgacctgcagtttctttgtcaggaaaagaaccgaagcagaagcaagaacgggaagcaatacacagagccctaatttccaattcatgatcagaagggctgcgctgataaccaaaaagtaaattgcaaatcctatggtattagccactgcgttcgcaaaagcatgctcaatcgaagccacatctgccatgattgtttgagcaaggtcagacaaattgtgctttgaaaaataggataggggcagcttggaaagctgttccgccaaatcaattcttaaatttgcagattcctggtaggtttcatcataggtcgttttatagttatagttaataactaagtacatcaccagggtcgctaccagcataaacaggagatataccaccggtttcccggtgtttccatgcagcagcctgtctgcaaacagaaaaacacaaatcatcggcggtacaaaagagacataatagaggaagaatgaccagattgattttacaaggcctttcgcacccgaatcactaagctggaaggcattttttagatatgtcttcatcatgccaacctccactgatttgccttgcagtatacatcctgaaaatctttataacgtccattgtaggccatcagctcattgtgggttccttgttccacaacttttccattctggacaaacaggatctggtctacattctgaatagaggacagcctgtgtgcaatcatgataactgttttgcctctcatcagtttttggaaagcctgctgcaactcgtattcgttttccggatctgcagctgcagatgcctcatccataatgatgatattcgcattctttagaatagcccttgcaatggcgatcctctgcacctcgccaccggaaaggtatacgccctttgccccgatgacggtcatctctcgctgggagaatttgtcaagaatagatgtgcagttcgctgcgtcaagtgcatccataatctgctgccgtgttgcctgagaatttccgattcggacattttcgtaaattgaggtcttcagtaattgactgtgctggaagacaaatgctatgttctggatgagagctttttcagaataactctgaatgttctttccaccaatcagaatctcgccgccatcaacaggataaaatcctgaaatcagctttgcaatggtagattttcctccgccggaagacccgataagcgcataagttttattctgatgcagtgtcaggttaaaattcttcagcacgaaggtgtcatcatatttaaagtcaacatgacgaaattcaatatcgaaattttggaagttctcttcgcttccatgcggaagctttgcctgatccattgaagcagtcagctcatcaagctgattcagcgtattttgtgcgccaaagttatcctgccccgtaaacataatcgatgtgaaagaagtaaatacagctccggagaatactgcaaagaaaacaatctttgccaagatcagcatggcaggttctccatagctgatgagtacaactgcggctggtacggcaaaagcataaaacacgttgaacagaacctggaatccaacatagggattcttacaactgaggctatactgatagacgtactgtttgtactccttgatcgagtcaatcagagttttgtaatactgtacagttacaccgaagatttttatgatctgcattcctctgacatattctactgttgccgcactcatcttttgaagtgccgctgaatagccagacagaaattcagtaccaccggacattttacgatactgaagaacaccaattacagttataaggatcaagagaataccaaggcggtaatcaattgcaaacatcagcacaaacattaataccggcgtcataacagcagtaatgttgtctggaatcaaatgggccactgttttgtgtgtttctgctgcgttatcatcaataacttttcgaatctctccagaactgttgtggtcaaaaaaggaagaagaggcatccaataatttatgaagcccattttttcttaagtttgtttcaagccggaagcctaaatagtgggaacacgttgccgatgcaatgttgaggatgcctcgtaaaatcataagtgcgactacgataattgcatcatacatggccttctcatatgcggggataaccagaatggacacaatgcattgccagagaaaccaataagctcccatatatgagcagacggcagcggcagacaatgccatagaagaatatgcccaaattcttttatccgggacatattgcaacagttttttatataaacaacgaattgacttcaaatccgagcctcctttttgctaaaaaatggtttgacagacatctgctcttttattataattagttgcggataactgtaaagggcaaaacagatataaagtctgaacaaggtactaacaaatctaaccgaggtatctttggaggggccaatgatagaagttaaacgagaggatttctttattgaatcgataaagaatccaatagagtacggaacatattataagatcaatcagaaatatggaatcggatttcaatggacgaatgaggttcaccacgatttcgtcattacagtgacagacatacgatttaatcaggaaaccgtggttggagaacatattgggcctggatatgtacttgctctctatattagtggcgcaggagatgaattttatccgtatcaaaatgtttctccgaatacattgcgctgttatgaaccatctgaaaagtacaaagctatttatcatcctcagattccattaagatgtattactgtgcagtttgaccaggaatttattgatcagtatctccaggaaatttccggtgatcttgaagtgaacttttctgatttcttcaaagaaaaagggaaattctatttaccaaatgtcaatcgtgctatgcaaagcctatatgagtatctgctttccatgaaagcgtccagaattacagtagaagcaaaaatatatgaaatcatctcgattcttgcttcttatttgaaagaaaacagactaaatgaagagaatgcccgatccatcaacgaaacagatttacaggcattagatgaactaacgcattacatggatgaacattacagttttaatattacattacagacgctttccaccattgcatgtatgagtgaaagcaagatgaaaaagctatttaagtcagtttataatatgtccattaccgaatacattcagaggaaaaggatctctgtagccgagcacatgcttattcagaccgacctcaccattgcggaaatttcaagaattgttggatactccaaccccagtagattgattgaaatattcaaaaggtattatggatttaccccttcaaaatacagagaataagagaataaaagtattatactaattttatctaagcgtacaagattttatcgtaaaaaattaacttaagagatgacacgacaagaattatttacatggatacgccaacagtacggcacagagccggaatatccctggcatgactggaatgctgtgctgcggcacaacgacaataataaatggtatggtgtagttctggaagtatcagctgataagttgggactgccgaaggcaggcatcgttgatgtccttaatgtgaaaagcgatccgctgctgatcggctctcttcgcaggcaggacggctattttccggcctatcacatgaacaaggaaaaatggctcagtattcagcttggcaaaccggaactggatgatgctattaaagatctgctttctttgagctatgagctgacagcaccgaaaaagcgcaacttaaagtcatcaggaaaaaatccgggggattccgcaaatggcaaagaaaaaggaattgacgaaggctgagcgaaaggaaacacgcctccgaaaaggcaagcagtggctgctcacctagcgtttatctggagagtgccaaaggataaatagaagcaacattaaagccgctcaccgcgcaggttctccagcgtggcgaacggcttttttgctgcctccatatttacaagtatgaggaatcgaagaagtcttttaaggtaatttccaagccctgacagattctttcaatcgtctctacgcttaactgccctccccgacgggcggtggtttgaatcgtggagtacgatattccgcatttctttgccaacacacacagattcatatcacgctcctgcatcaaatcctgaacacgcttgatcgtatccacgaaaacccctcccatctttttagttcaaaacctttccaacaatctcgaatctttgctctggagatataaggattggcgaatatttggtgttaagagagaccaaaaccggttggttgtgcaccacgccatagctgtcggtgagaagctctgcctgggacttgtctggggtatgttcatcgtattttttcagatagccacaaccatcatatacgaatatcccgatatccccgcattcgagttcttcgcagcgctttacccatacgatttgtccgttatgataacgcggctccatactatcgccgctaacgtatatcccgaactcagcccctgccggaacactgctggcaggcacctgtatccgctggaacatttcaccttcaagaaaagctcctggaccggccgataccggtaggtctgatacaggcatcactatatggtcgatttccgcaggctcttctgtatctggctgatagcgccgggatgcaatcaagtccatttcgtactcggcaacttttttttgtcctatgtcatttagaagggcaggcttctgaaagttcctcgtaaagtaggaaggtccctctttgatgttcaatgcgtagcagattgcaactaattgatagatgctgggggtggtgtaacctttttcccatttgttgattcccttgtcactgacatcgacgccatagtgacggagaagttcagagaacgctacgagtgaatagccattcctttttcgtatgtctgcgagaatcagaccaacctcattactgtccctcgcagcgactgcatcatagcgtactatagcgggggctatgtgcattttggtgagcgtggttttctttttcataacaagaacactcctttgtgatccggtagctctattatagtatagaaaatataagaaatcaacaagaaatccccaaaatagcgacaaatgcgtaattgacatctccataaagtgggtgtataatcgaaccaaatccacgaataacagccttttggtgttgtttctgtgtggaattgtgtttgcttggcgtttttttgcgaggtgatactatgaaaaaagaaaatgtaagatgcccgatgtgcggaaccatgaattatgatgtggatcttgatgaaaccagtggctggacaaaatgccgtcggtgcaaagcagtgacctgctctatggatgagtggaaaaaacatacagtgtccgttccgctgttgaacgaaaaacagctcgtggcacgcagtatgattcgcaagtaatgcacactgtgttctgacaaacctgtaaaaggaggggttctgatgtgtggtgattacaaccttcgccgtgagaaaagatacgtcgaagtggacgttcgttttactcctgatggcaagatccgccctcttgccataaactatgacaaggctcacacttatggaattgatcgtgtcttggcagtcaaacacgggacatcacgcctaggcggaaaaggtcactgcttcacctgcctgatttgcggtcagaagcggaatctttggcttgaacagggcaagtggttcgtggaagcctactgctccgtgccggaaagctgtgcttcgtaatggcaagatacttatcccgcacagacctttcgcacatagcgggcaggtatatcgagcagtactataactgtttcggaattagcagggatgctccagaacccattgaccctgaacggctcgcaagctctgttcttgggctgaatgtgaaaatgctgccgctatgcagcgatggcagtgtcctagggctgactgttttccagaaatgcggttttaccgtcaccttgggggacgggacaaagcttgttgaggtgttcatgccgaaggacgttgtgattgattcagcccttgcggcagactgctgcaccggatgccgaaatttcacgatagcgcatgaagcggcacaccatattctggctgacctgtttccgaacgactacggaaaagcagtcaagtgccgtgggcacattgcctatcgggaacgaaacggacagccctcatgggaagaatggcaggcgaacacccttgcagcggagctgctgatgccaacatttctggtcaacgccgaaatagaacgtgcagcgctgtgcctgtcaaatggaattctgtacaaatccgcatcggacccgaactatgaaaaaattcttgagatggctgcacggatgggagtatcgtggtctgcgatcaggatcagattacagcagatgcaggtcatcaacggcaaacccatccactgccacccattggacgtcattcgatttggagaataatatgacttggtcaaataatcgctcttttaagggtaaaccgctgaacaatatacagcaggcacaattcagcattggctggaggttttgtccggtttgcggacacaagctctaccaaaaaaacgagagctgttcaggctctatcagcataaagtgcctcaagtgcggtaacgtagcaacagttgacttagcctaccgcaggcgttgattgctttataggcaaaacacaattttaaaaatcgggtgcattgcaccctgaatatggactgttcgtcaccgagcaacgggccattgccgcaaggcaatgtatgaaacgtgcaccaaatagccgggcaacagctgatagagtgattctgcttttagaaccgctctgttagttggttgtccggctatttttttagccttcaggaagcctgctcccgtaaaaaggagcaggctttatgtttgtccgtttttcgtggatgccccaagcggcgaaatatccgtagccttccaaattttcgactttttacgctttatcgaaaatttggaggttacacatgagtttcaataatggtaatgaacgtcgcaagctgaacgcaaaatgggagcaacttcgtgtgcagtaccgcgaagccggaatgagcgaagaggcaattcaggcgatgtatgagtttgatttaggcgtcctgaacagtgaacgcgcctatgatgccaacacggtggcagtctgtgatggcgaagatgacgttgacgcaaggaaagcagctgatcttaagcaatatgaggctgcaatcacggtaacggatacctaccacgaaaccaagagttgcttctcatggatcggcgaaatcgagaatgagcggttgctggctgctcttgaaagcttatctgaaaatgacctcaagcttttgaccctttatgtttacgagggttacacggagagcgagatttctaaagtttttagcatttcacagcctgcaattcataagagaatcgagaaaatcactatatttttgaagaagttttgatttttggttataatttgacccttctcgatggctcgtaagtgaagggacaatttcccaagcggcactcaccgcagggcaaagcgtccgacttcatggtccttgaaaattgaatagttccgtcatctggtactccgataatgatacttccgtaattcgcggcccggtcacaaagcagacggggtggctgaaatgccaatgaagcggtacaagtccgctgccagatgttcatgccccactcgcagggggccgagggcgaatatgcgagacctttaatcatattgatccgggaactgccgggtacgttccgcgcatccggcagttcccgttttttacgtattcttattttattctttacccgaatatccacttttgatacataggaggacacttttatggacgagttgaaccccacggtgcgcgagcaggaaatctacgaggagatggagctgacccctgagatggtcaagtccatccgcaccctctgcggtacctgtctgcgtcattttgtggatgcaaaggcgttcaagatcgcgcttgtacccagcccagaccggagcatggacacctgcaccgtctgccagatgcggcgcggctatgattacgtggtcatgcaccgctgacccaaccataccaccataccttgaacgaagcccgctgcggaacatccggcagcgggctttgcacataacaacatggaggtacaattttgcagcaaaactggaaattccaacgcggagacatcttctttacccatttcggggcgagcaccggctcggaacagcacggtgaccgtccggcggtcattcttcagaatgacgtgggcaattaccactctccgaccctgatcgttgcgaccatgacaagcaaggcagaaaagaaagtaaaccagccgacccactgcctgttggaaaacgcggggttgaatatgccgtctgttgtgcaggcagagcagattttcaccatcgacaagagccgggcactgaagtatctggggcatctgaccccggaggagatgcgccgggtggacgatgcagtgcgtatcagccttgcgctgaaccctatgggcagcatccagcagatggagcctatccggcgctctacggcgatctacgcgccgcctgaggtggtggatggcaaaccgcctgtctacccctatacgcccatccggtcgtcctttgagaacgccggaagcatcgaggaaatgatgctgtacaccgagttgcaatccgcggttcatgccatgatccagcggctcgaatacagcttcaccttcaatcccagcctgctcaccagcccgaagcgtaagcagcaggtgacggaaatcttagaggaagccgagaagtacatttggaggatcaaggaggaaatgagatgcgcctgaacgacaacaatactttcattggtatcaacccgccgtaccagctttcggtcatccacagcagcaagctgatctatccccgcgagatctaccagcggggcgtggagcgcaagcgggtggaactgatcgccaaggacttcaacgagtacatcgttaacgagccgaaggtcagcttccgcaacggcaggtactatgtgatggacgggcagcacaccatcgagggctgcattctcctcaacggcggcgaggaccgcccgatcctctgcaaggtctacaccggtctgacgatggagcaggaagccctgctctttgccgagcagaacggtcacgccgcacccctgtcggcgggcatcaagctgcgcgccaaggtggtgggcggcgatgcgccttccaaggcgtttgtcgcagccaccaaccgggtggggctttccctcaactacgacagtatgcagctgagtgactaccgcatcagctgcgtgggcacggcgctgaagctgtacgaccagctgggcgaagaaatctactgcgaagccctgcggcacatcgtggaagcgtgggagggcagaccggattccttccgggcggctgtcctgcggggcgtgatgtattttgtgcagctgtatcatgggcagtacagtgcggagcggcttgtccgtgcgcttggtagcgtccaccccatggagatctaccgtgtcagccgggataaccccgccaagctcccgggctggcggcggtacgtttaccccatctacaccacctacaacggcaagtgtaggaaagacgcactgccgatgaagttctaagctcaaatatctcctttggcaagggcgatggtacccgaaaaagaccatcgccctttacatatagtattttcctttgaatagttgacatattgaactgaaaggagaggacaggaatgagcgagaccgcagcctgcactttgattcaggaagagcccgaccgcaagacggagcggtacactccattatagagagggggggaatctgtttgggcgaagaaactctgaatccccgtgatgcataccgtgtgatgctccgggattacccggatgtgctgaacatcgaccagatgtgcgagatattgagcatcagcacgaaaaccgggtatgcgcttttgaaaaaggggagcgtccagcatttgaaggtcggacgctcctaccgcatccccaaggcacatcttttgacttatcttatcggattcgcacccggtcacaccatccgggcgtgacatccttgcattctctcctgccgttgggtacactgatggtgtcagcggcagaagttacatattcaagtggatgcaaaaagacaggaggaaacactatggtagcagggcatctgcaagaaaaaaatgacttctactacatcgttctgagttacaaggacgcagacggaaagcgaaagaccaagtgggaagccaccgggctgtccgtcaagaggaacaagaagaaagccgaggctcttttgctggaacgtcggaggaacttcgtggttcccaccgcacctgcggagatccgcttagacgatgacattctcttttcggacttcatgctgaaatggctggaagttacgaaaagctctgtccaaatcacgacctatgccagctatcagggaatggtggagcacatcatcgctccctatttccgcaagcgcggcatcaagctggtagacctgaaagccaccgatttgcaggatttctatacgaaacagcttgaacgggtcaaggcaaattcggtgatccattaccatgcaaacatccacaaggcattgaagtatgcggtcaagatcgacctgatccccaccaatccggcagataaggtcgagcgtccgaagaagaatgagttcaagggcagctattacagtgccgaagagatccatgctttgacggaggccgcagagggcaccaagctggagatcccggttctgctggcatccttctacggcctgcgccgcagcgaggtgctggggctgaagtgggatgcgatcgactttgaggaaaacactctggagatcaaacacatcgtcacgcaggcatccattgatggcaaaaaggttctgattcaggctgaccgtgcaaaaacgaagtccagtctgcggacgctgcctcttgtgccccacatccgtgaccgtctgctgatgctgaaaggtcagcaggacacctaccgccgcctgtgcggtaaaagctacaatcgggattatctcggctatctgtgtgtggacgagatcgggaacatcatccgccccaactacgtttccgagcagttcccgaagctgttggagaaaaacggtctgcgtcctatccgcttccacgacctgcgtcacagctgcgccagccttcttctggcaaatggcgttcccatgaagcagattcaggaatggctggggcacagcgacttctccaccaccgccaatatttacgcccacctcgattacgcttccaagctctcgtctgcacaggcgatgctggagggactgggctatggcaatgcgtcagcatgatgccatacgccccaaagacagggtggacgggcgatgttccggcaaaaaagaatggacagacgaataaaattcatctgtccattcgatttggcggagcatcagggagtcgaaccctggcaccggtctcccggcctatcgcatttcgagtgcgacctcttacgaccacttgagtaatgctccacatattaaattttagaatgctccgtgcattctgggaaaactttggagagaatttcaggagagaacgaccgaaaatcgctcactcacgaagtcggaaaacccgcatgaaacctagaaaaaccggaaatccacttccaaaaagccaattggatttcgagtcgttctcgttacgaccgcttcgatacatctccataataaaccttatacagtataacaaaaaagcctgctgccgtcaacacttttctccaagtgcctcgccaagcgcggtgcagcgccgggtgctgtgcctgaatcatccgcacacagtacaaaacggcctgcacacaaaaacagaccgccgcacaaagtcttgtgcagcagcctgcggtcatagttcagatatgatatgctcagttcttgctggtgctctgatttgcgatgaactcttcgtacacttccttggtgatttcccaagtcatggaaaactcggagttctcgcggatgggaatgtactggaacagcacggtgtcgccatcctgcaacttggggaagttggcagctgccaagtggatcgtgataggcttcttctgctcgatccggctattctcagcatccagaatctgcacgccgttcctcaagctgaaatagcgctggttatcctcagaatccttcacggcaatcgagaaacagtccgtggtcagccggatggggtttgcacgggcagactcgatatccacctccaaagtgcaggtaccgttttcgatcttcatgcttttcaggccggcaatgacctgcagatcgcttttgatcgcgccaggcagcgttttgcagaccgggtttttggggtcctgatattcacagccgcccagcagactggcaccggccacagccactgcggtggctgccgaatacttcaggaatgcgcggcgggaaaatgtataagacataacttattcctccgttatttaccagtatattcttccgacccggaaggtcaggtcgtagaggggtcggagagatccggttccagaacctctgcggccagttcccagttggcgttgaactcaggatactgcaggtcggggtagaaggtaagagttaccggaccatcggtcagtgcgttcagaccctttgccattacatggtaggtaacggtctcgccctgcttgacctgatagctcagtgcatccgggctggtcacctgcagcttatcgttctggtcggccagatacccctctgccttcacggcaaagtttgccttggtcacttccagcgcattattgcggccattggtcaccaccacccggaacaaggtgatgttgtcatcttccttgtattccacccggtccagcgtggagacgaccttcagcacaacgttgctggtgccgggagcgtgctgcaccggggcatacccggagcagccggtcagcaggctgctgcccgccacagccacagcggtgagggcggtatatttcaggaaagagcggcgggaaaattccccagtcatattcgttcctcctttgggacacatcaataatacagattctgccatagggcactacctatacaataggcgaaacagagaaaaatgtcaatgattttccgcaaaacaaatgtgaatattttgtggcagcatcgcgcattttagacgaagtttaagtgttttttctggtgattctgtcagctgcggatcacatcggaagcattcatgacgaaggtcaggctcttgccctccaggaaggtgggcacataagtgatcttcagctgcttccagtccttgggcaccatgagcatcagcacaatgtaggcgctgccctgcgggggcaggctctccacatcggaaaagctctgggaattggcgttgtacagcgagatattggcgcagcaggctgcgggctggccatcgcagacggcggtaaagtccggggtagcggcggccatggcctgaaagtttgcgtccacgttctccagcgggggcacggggtaggcctcgttgatggcgtcaatgccctgtgcgccgatggcgtagctctcggtcttgctgcggttgacggtggtcacccgcacgcccagatactcgtagcctgccggctgtacagggtcctgcgtcaggtggaacacgctggtcagctgcacgcccaagccgttccagttgcggacggtgtcgccgaccttgacctccaccacagtgtcgttgccgttggacttacagccgcccagcaggctggctgcgcccagtacggcggcagatgcaccggtgcacttgaggaagctgcggcgggaaatgacagtagacataaggtatatcctccttgaagggtcagtttctttttcttctttctctggttataccgtttccggcgcacagatgcaagagtccgggctgattatttacaacaatttcacaagccggtcactcttgcggcgaaagccccttgacatgggtctcgctggtcttgaccagatttaacaggctgggcgtgtacagcggaaattcccgcgtcaggctctcggtggtcatggcaaggcaggcggggtccttgacgccctcgccgccgttcacatcctgcccgtccagcagcgcctccacgttggcttccgccatccgcatcaccgcatcggaatagccgtgccagcggtggggctcaatgctgaacatgctggaggcgttgtgcggctccgcagagtagagcagccggaacatcttggccaccgccatcatcaggtaggcgctcacctcggtggtcaacgccttgctgtggcactggccgatcttggcgtagagcacgttcaggctgttagagataagttttttgttcatggtgggcagcacgctgccgtggtagacgttgtccttcatcttttcggggttgggcagatcctcggcagagagcatcatgccgttgcgctcggcgctgcgccccagcagataatcgcaggaaacattatagtaatctgccacccgcaccacaaagtccaatccgcactcgcggatgcctttttcgtagtgggacagcaacgcctgagagacccccagatcctctgccgcctgcttttgggtgatgccgcgctccttgcgcagcagcttgatgatacgattgaactccatggtgtgctctcctcaatgtccgcaggatctgttttttggtaacatccttgtttttggtttacaacaggttgattatacacattggaaaacgacttgtaaagcaagaaaaatgccgatatttttcgtcttttttcgtcattattgtcaaaagtcttgccggagaccccacatctatgctaaactatgggtattaacacatagattttgtgtttccgctgcggcaaaaaaacgacaggcgtagtgaaagcaggtctttttcgaaacaaaattttttcaaagaggtggttccatctttctgcagtttgtgctataatctctttttggcgactgttcttgaccggcgcacaaatctgcaaaggacaaggcagacgctataaaaggtaatataccaagaataagaaagaggaaacttcatcatgaaactcgagcgcaaagtccgtctgtgcagcgctgccgctgccgtcctgatcgccgccatcgccctgaccggctgcggcggctccaagaccactgcttcttccgcagccgcttcttctgtggctgcttccaccgctgctgctaccaacaacagctgcggcgagggtgtgacctgggcactggctgacggcaccctgaccatcagcggcaccggccgtatgaccaacttcaccaaggacgctccggctccttgggctgatcaggccgaccagatcaccaccgttgaggtggagggcaccgttaccagcgtgggcgctaccgccttcaaggactgcactgccctgaccaccgtgaacatcgccgacggtgtggagtacatcgaggccggcgctttcaacggctgcaccgctctgaccgaggtcaacatccccctgagcgtgggctacatcaagaccggcgcattcaagggctgcaccgccctgaccagcgtgaccatccgcgacaactgccgtctggacatgaatgtgttccccgataccgtggaggtcaactacgccgagggctaagccctatccggaactttaaaccaaaagaggtgtgatccatgaaaaccttcaagcttcatctcatccgccacggcatgactgcgggcaacctgcagggcctgtacatcggcagcggcactgacctgcccctgtgcgacgagggccgtgcgcagcttgccgagctgaaagagcggttcgcctacccgcaggtagatactgttttctcctcccccctgctgcgtgcggtggagaccgccaacatcctgttccccggggctgcccaccagtttacggtgcacgatctgcgggaggccggttttggcaagtttgaggggcgtccggtgaaggatctcgtccacgacgaggactttaaaaagtggatcaccccgggctccggctatctgccggagggcgcagagcccaccgagcagttccacgcccgctgtgccgacagccttatgaagctgtttgagtacatgatccgcatggacgttaccgaggccgcctgcgtgacccacggcggtgtgatcatgagtatgctcagccagcgcgccgtgcccacccgccgccccgagcagtggatggcagacccgggctgcggctacaccgtgcagaccgatgtacagctgtggatgcgggacaaactggtggaggccatcgacatcgtacccttcggctacgccgacaccctgcaggggcaggccgaggccgaggagaacgaggcctacgaataagttacagtttcccgccgccccttgacagaacgcgcagaatcctttattgttaaggggtagtattgtatcgtatacaggaggaacgctgtcatgtcccaatccatctcccgccggtcattcctgaaatgtgccggttccggtgcggtcagccttgcggctgccctgcttaccggggtctgtgctgcggcacagcagccgtgtcttgcgggcgagcctgccctgctggacggcaaagccgccgtggagctgctgggctatgccccggcaccggagctgggcggtgtgctggtgtacctctcggtggaaaacctctcggcagccagcctgccggtggataccagctacctgcaaagtcggggtctgcgtacccgggagcagctgtacagcatgggcaccggcgtgaccgctgcctgcaacggccagagcgtgccctgcggcagctttgccgccccgctgtacaacgagaacgcggcggacgcctcggtgttcaccctgaaccttgccgccggacgcggtgcgctgctgcactgcttctgcgccgtgccggaggactggcagacccttgcgctgacatggcacccggactttgccgccggacgcagcgccatctttacggtgcgccgcgatgccgacgaggccgctctgggccccgtgcccaccacccccgccgaggtcggcagcgtggtggatctgtaacagcataccaaaagagccattgcacaaattgcgtgcaatggctcttttttgcttggtaagaccccttccgtcatcgcctgcggcgtgccagatttctccgaggtcgagacgatttgaaatggcctccgctgtgctctggccataatcagcggaagaatgattttaaatttcgggttacaggaaagtctgcggagcttgtcggggcaaagcccctccatctgctaacgcagaccgctctgccgcttaaaagccccactnnnnnnnnnnaaacgcggactttcctgtaacccattttcacgggaggagtcatagagggaaacggcatttgcagcaccgctttctgcgaaagcgcggcgctgcgggcgtgcccgctcccccttgggggagctgtcgagcgtagcgagactgaggggcttcaaatcggcggagccggaaaaaacggttaaaagatcttcacgccgaacaggcgtgaatcttcagttttttccggtgcagcccacccctttggggttaaaaggggcgagcagcccctttttcgtggctccagcgcgtcgaaatcgctggtggttttctggttctcttttgccaccaaaagagaacatccctcggcaagcagaaccttcctcgcggagcgcattcaaaatcgtcccgttgccggagatcagccggctcccaccagcgcttcgccggtgctgctttgcaccagcagctcctgccccgtaaggctggagagcagggcgatgtagctgcgccccgccgggaggttcagcggcttgccgttggaatcgtagagggcaagggtgctctgggtgccctgcgtccatgtgacctgccacaggtgtccgccgttcagccagacgccgccacccatggaaaggtcgtagtccagcgtgcggccgtcgtcccgcagggaggagccgctgtacaggatgagcaggttgtcaaagaccgcctgtgtgccggtgttggcatccagctggggggtgccgtcggcgtgcagcatcccgtaggcggcaagggcatcgtcatagacaaagccggtggcaccgccggactggaaattcacggtcgcctttaccgcatcggcggcgtttgcgtccggcagatggccggtgtcccgctggggcagcagggtgggcagcacgcccgccgtttcgctctcgctgccggaagtggtgttctggttcacggcggtggagatgctcaggctgtccagcaccgaggcgaccgccttgccgctggtgcgccacaaaggggtgttgtcccagctgtaaccggtgctgacaaaggcattgcgtcccacctcctgcgcgtccaccgcgcggagattatagtattccagataccgcttggcataggcgctgctgccgcactggatgggcagcacctgctgcccgctgagcagccgccagtataagtcctgcccgcgcgtcaccggccctaccacaggcatggcgctgagggcggggtacaccagacacagctcggtggagctgccgctctcggtcattgcttccagcaccaccgaggcactgccgatgccccattgcgtggtactgtcggtggtgttctcaatgaccaccgccgccgcccgctgctccgggtacagcagctgctgcccggtaagcgggtctgccggggcggtgctttctgcgggtgcagcggcggtgctgccacagctgcccagcagcaccgcgcacagcacggctgcaccaaggcgcagactccatttgcgtttcatgggcttctccccttactgatagttgaagttgggccactcgtcgtcgtccacgatggccagataggtcttgccccggttgaagcagatctcgcagccgtcggcggcgtagaccttgagcgggtgctccggggaggccttctgccatgtgccgcgctgcactgcgccccgggtgaagaaataggcctcgccgccggacacatagtccacctgctgcacgccgccggagttgccgggatagtccgcgatgcccgcaaagcagaccagcaggttggtaaagccaagctgcttgccggtcagctcgtccacggtgttttcaaaggcaccggcggcgcggctgtacatggacattttataaaggtgatcccagcggttgtagctgaaggtggtcttgtagctgtccgagtgcacgatgttgatggtcttggcggcggcagcgccggacatcttgttctctgcgccggtgcggtagtccgcaaagcggaagaaggtgctctcataagggtattgcagcccgatacccgcgttggcggcagctttccggatctcggcaccggaggtaaattcggtgtgctcgtaagccacgttgcggccgcggctgtcgcggtgcgccacatggggatgggtgggggtgttgaagtagctcttgccgccgatgttcaggccggagtagttgtacacgttgatgaacttggtgcagggggcgctttcgccatcgtggtagtacagcgcctgccacggcatgagcagctgcaggaactggtcacggccggagcgcagcgggcccacctccgggatggcgttggcgtcataatacaccgcgcagaagcgggagatgccgccctccaccttgctctcgatgagcaggtcggcagaaccgatgccgcgctgcgggcgggcgttctgccgctgggtgttgctgatattgttcaccatcacgcccaccatgcggccgttgctgcggcgcggctcgccggtaagggggtcggcgttgtaggcgggcaggctggtgtcggcactttccgcagggagttcagacgccgctccggcgtccggggttcctgcatccggggctgcggcctctgcgctttcagaagaggcggcgctgtccttcccgaaggtctgcttcagccagtcagaaaagccgttgcccacacaggcgctgccggcgggcgcgcagccggacagagccagcgaggcggctgccagccccgaggcacggagaacggtacgacgcgtgatctttttcatgcaaaaaacctcctgataagagcgttttgcgcagccccggcgctgtcggatcggttgcgcgcggtggatgaaaacgaacggcctttcggcactgctttgattgtaattgtaacggttcttgcggcatttgtaaagtgaaaattagcggcagcgtagaagaggggtcaccgccgggaagtgacccttccggggcagcccccggcaaaaaggcagaatcctctgccatgatagcatggagaaaaagtcccggagaaaaagtccccgcgtttcttgcattttggtgcgcgatatggtatctttttatacaggtaaacacttcagggtcggcaaacattttgttgcttctgccgtccccttgaataatgacaggaaggaatgatacttatgggtttttttgacaagctttttggcggcaagtccaaggacgaaaacaccgctaagttcaccaaccagagcaagaccgtgctgaccccgctgcagggcaaggtgctggcacaggccgacatcccggacgagacctttgcacagggcattctgggccccggctgcggcattgagcccaccggcgacaccgtgtatgctccttttgacggcactgtgacccagatcgccaccaccctgcacgctgtgggcattaccagcaacgacggcatcgagctgctgatccacgtcggcatggacaccgtggacatgaagggtcagggctttaccgttctggtcaaggaaaaccagaaggtcaccgccggcaccccgctgctgaaggtggatctggacgccatccgcgccgccggccaccccaccgccaccgccatcatcgtgaccgatggtgcaggcgacgaagtgaagatgctggcagagggcgatgtcgctcccggcaccccgctgttcaaggtctgattttttgcgtcataaaagaggccgctgcaattgcgcagcggcctctttttgcggaaagcgtagttttacagcatgatgccgggcagccgcaggctgcccggcatcacttttttacaaggttcagacgatgcggacgcccttctggatgacggccttaaggttcagttccttgtccgcaaggatgacgttgccgtagcgtccggcggcaaggctgccgtagtcgttatccacgccgatgctcttggcgggggtctcgctggcggcgcggacagcgctttccagcggaacgttcatctccagcacagcgcgcttcatgcagtcgtacaggcaggtgttgctgcccgcaatggtgtccgggtgctcggtcagggtagcgcggggtcccttgaccgtgatggcctgtccgcccagactgtactggccgtccggcaggccgcaggacatggcactgtccgcgatcaggcagatgcggtcgtccccgaaggtgttgaaggtgaaccgcaccatggcggggtggatgtgcacgttatcggtgatgagctccacctcggcgtcgtgctccatggccgcaatgatggggccgggcgcacggtgcgtgatgccgggcatggcgttgtacaggtgggtcatgtgggtggcaccggcctcaaaagccttgacggcggtgtcgtagtcggtgcaggtgtgggcgatggagatgcgcacctcgttatggcactccttgataaagtccagattgcccggctcctccggggcaacgtccaccagcttgatcagaccgcccgcacgcttctgcaggcggcggaacatggcggcgtctgcgccctgcacatactccggattctgtgcgcccacctttttggggctgatgaaggggccttccatgttgatgcccacaaggtcggcacccttgccgtttttatgggcggcagcagcgtccatcaccttgttcaggatctcctcgggataggtcatggtagcgggacagatggccagcacacccttgctggcctcgaaatccgccagcgtctggatggcctcctcggtgccgtcgcagaaatccttgcccattgccccgtggaaatggatatccacaaggcccggcagggcgtacagaccctcggcgtccagcacctcctcgccctcttccggggcggcaaagggcacgatgcggccatcgcggatgacgatggtgccgagctcaaaggtgtggcgcggggtatagaccagtgcattctgaaggatcatacaaaacacctcgttctttcttctttttcacccagtataacacgccgggtgttttttcaaaagtccttttgtgtgaacattgtaccgctgtgtacaaaaagcgggccgccgggagggggcgctgtgcaccccgcccccggcggcccggttcatactgcaaaatcaaccagacttttgcagttcattctttttcagaagtgcaggatcacagcatcttcttcagctcgtcgtagacgaactgcaccttggtgccgatgatgacctggcaagcgttcttgctgggacggatgacaccggcagcaccggcagccttgacggccttctcatcgaccttagcgttatccttcacctcaaaacgcagacgggttgcgcagtaaccaacgtccttcacgttctccttgccgccgacagcagccagaacagcagaagcgacttcggtgtagttgttgttagccagaacgaccttcttctcagcttcctcgtcgtcatcctcacggccgggggtcttcaggtcgaacttggtgatagcaaagtagaacacgaagtagaacaccaggaatgctgcgatgcccagaggaatgatcatccaagtcttagcagctgcgggcagagaagcggagaacaccaggtcggtagcgcctgcggagaagcagaagccggcacggaaaccggtgtagtaggtgatgatggtgaagatgccgtacagagcagagtacacaacgtacagcgggaagcacaggaacatgaagccgaactcgaagggctcggtaacgccgcagacgaatgcgcagatggcagcggagacgaccagaccaatagcagccttcttgttcttagcggtcttgaccatagccagagcagcaccggcaataccgaacatcatgcaggggaagaagccggacatgtacatgccaaggctccagcccacatcagcgctggtctcacctgcccagaagtgggtcaggtcgcccagaccgatggtatcgaaccagaacacgttgttcagagcgtggtgcagaccggtggggatgagcagacggttcaggaaagcgtagatgccagcgccgatgccgtccatgccagcgatgcccttgcccagagcgaccagagcgtcgaagatgacgggccagacgaacagcagaacaacagatgctacgatggagatcagaccggtagcgatcgcaacgaagcgcttgccggagaagaatgccagccagtcaggcagctgggtatccttgaacttgttgtagcaggcagcgccgatgacggcagccagaatgccgataaaggagttgccggcgaccttctggtatgcaatgtaggtagcggtgccctcttcgatgtggcgcacagcgctgaccacaccggggttcagcagctgctgcatcatcaggaagctgaccagaccggccagacctgcggtaccgtcgttgtcagcaaggccgacagcggcaccgatggcaaacagccaagccatgttatcgatcagagcgccgcctgccttgatgagcaggaagccgatagtgtatgctgcgccggaagttgcgccctcggcacccataacagcgggagccagagcgtagccgatgcccatcaggatgccgcagatcggcagcacggcgacgggaagcatcagagctttgcccagtttctggagatacttcatcataagacacattcctccttaagaaatgtttgtgtttacagacagtctctggttgcaggctgtccacagttccgtaacagaatagtaacatatttttgcaaaaaaagaaagtggttttttcttttttctattaaaatgcgtcaaaagtccttattcgatggcacatctgtcagtattttttgttttttctgcacgcgtcctgatttaagtgctgaaaaatcttttctttttatgtctattttgtccaaagggttgcatcccaccataggtctctgcgtccgtacatttttaaacaatgcgttttccgtccagcacggcctgtttcagggtgtcgccgtcatacaccagcttgagggaaaagtaggggtgctcttcctccagcagacggaaaaacagcttatctccctcccagatgggcagtttttgcacctcagacttttgcacccactgcaattcgccctcggcgcaggcatcgccccggatcatctcgccctcccaccggtcggcggtgtacaggtggatgaactcggtcatgttgccccacacaaaggtcagcagtccccgggcacggtagcgcgtcagggtaaggccggtctcctcccgcacctcccgtacaaggcagtcctccgggctttcaaaccgctcaaatttgccgcccacgcccacccatttgtcgtggttgtagtcgtcctgctttttgatgcggtgcagcatcaggtaagcgtcctcccgctccagatagcaaagggtggtgctgaagatgggaaattccgggtccataaatgcgcctaagttcattgggtcgttctccttttttgtccgatgtttttcgccagagggcgagaatgcttaccgtatgccgccgctgcgcggcggcatatgcgtatctcttttcataagaaagggctgctgcatgaaacgctgtgcagcagccctttgggaagtgtttccgctgcggatgcccacaaagcagcggaagcatttttcgatttatgccttgcgcccggcgcggcccttgcctgcgctgttcagcttgcgcaccagatcgttctggtgcttgcgctggctgggcgtgggctgagggtctttggcctcccctgcacgcttgccggtctgggcaacgtcggggtcgatgcgttccagcatccactcctgattgccgcccgccacatagttccagatctgcgcctgtgcgccgttggcggtgttcatgcccacaaggtcgatgtacttatccgccagcacattgcggatgcgggtgcgcccgctgcgggtgggctccagcgcccagcactgactcagcccgctggtgcggctccactggtgcagccatgtgccctccaccacgccgccaagcgccagatcgatcatcttgccggtaaagcggttctggatgcgccagcgtccctcgcccgcgtccacaaactgccactgctgccacggatggcccgcatagctccacagctggatgccggcgccgttctccgtgttgaaatcctttacttccagtaccttcccgttgggggacttgataatgtagtattccccctccataataacgacctgcgatgcctttgccatagagcacaactcctttccgctatggtagccctattatacccgatttgcccgctggcaacaagaatgcttttccataatctttcttttgttttttgtgcattctgtcgtgtttttgcagcgcaaacgttttcgggagccagcaatgttttttaccggcgggcactttgcactccggcgcaggttgtggtacaataaagccatccactattaaggaggggatctttcatgactaacgagactttacaaaccattcgcagccgccgcagctgccgcgcctacgagccccggcagatcacggatgccgagctggacgccgtactggaggccggcacctacgccgccagcgctatgggacgccagagcgctaagatcgtggtcgtgcaggatgccgccacccgtgcccagctgacccggatgaacgccgccgtcatgggcaccgacagcgaccccatgtacggtgcacccaccattctggtggtgctggccgatgcccacgcaaactgcgccgtgcaggacggcagccttgtcatgggcaacctgatgctggctgctgcatcgctggggctgggcagctgctggatcaaccgcgcccgggaggagttcgattccgccgagggcaaggcactgctgaaaaagtggggcatcgagggggactggatcggcgtaggccactgcattctgggctaccccgctgctgagcccaagcccgccgcgccccgcaagccggattacattgtaagagtataaggagttttatgaagcctgattacaagctggtcgcaaaggccaaatacatccacaacaccgccgaccttgccagcgaactgtggcacgaggtctacaagcgctactaccccgcaaagcagctggacacccttgtggaggagctgcaaagcgccgatgccattgaagcggacatcgacaacgacgtgaactattttctggtgtttctggggggcaagctcatcggctacttcgcttggaagatggagaacaccgccctgcacctgatgcacctgtacctcaagccggagtaccgcggcaaagccatcggccgggatatcgtgcagacctgtgagcggctggccaagggcgagggcaaaggccgggtatggtgcaccatccacgccaaggcgctgccggtgcagcagttcttcaaggcactgcgctaccgtgaactgcgccccgccgagcaggaaaacggcaccgtgccccgcaacgagctggtgtatgagcacaccctgagctgaatatgcacctcaccggtcgcggggtaagctgccgcttgcccgcgccctcatcagtcacctgcggtgacagcttcccccgtccgggggaagccttaaatcgaagccgttatttcaaagaaatcacaaaatagccattgaaatttatccgcgtttgtactacactgatgtagtgtaataaagccgctgtctgcgggcattttgtgcaaaaaaggagactatcatggcgaaagatcatcccaccggcaactccggcctgtaccgggcttttctgcagctcaagaccccggaggaatgctatcgttttctgcaggacgtgtgcagctattcggagctcagcgcaatggagcagcgctacaacattgccgagttgctggccgacaagtgcatctacaccgagatcatggacaagaccggcgcgtccagcgccatcatcagccgggtcagccgggtgctgagcgcggacgacagtgtgctgcgtgcgctgctggaagctgaaaaaaaggccgctgactgatacaaaagccgcgtaccgcccaaagctgcggcacgcggcttttctttttaagatttgaacaggaggttattcttatggcaaaagctgttgtattttttgcggagggcaccgaggagtgcgaagctctgctggtggtggatctgctccgccgcgccaaggtggaggtgctggtggccagtgcttccggcagccgggagattttgagcagccataaggtgcatatcaccgccgatgcgctggcagaggaggtcgattattccgatgtagatttggtggtgctgcccggcggtattcccggcacgccgaaccttgccgccaacaagacggtgaccgacacctgcgttgcctttgcaaaggcgggcaaaaaggtagccgccatctgcgctgcgcccagcgtgctggcagcactgggtctgctggagggcaaaaacgccaccgcccacgctgcatttcaggacaagctggccggcgcccatgtgctggacaccgaggtagtcgtggacggcaacatcaccaccagctacggtctgggcggcgctatcccctttgcgctggagctggtgcgccagctggcgggagaagcgcaagccgaccgcatccgcagcgccatcgcctaccggcactgagaggagggagactgtatgcgttttgtcacctgccgcctgccggacggtgtggaggaccccgccatcctctcgcaggacggcacacaggtctggccgctgagctggctggggctctcctacgagaccctgtccgacgccatcccctttctcaccccgcaggtgcggttcggtttgcagctggccatcagcggcattcccgcactgccggtggaggccgtcaccctgcaaagccccatcccctgccccgcgcaggacgtggtctgtctgggcatcaactacatggcgcactcggacgaggccgaaaagtactctgcggacgccttttctaccaagcatcaggacgccatctacttctccaagcgggtcggccgcgcggtaccggacggcggcttcatcgaggcgcacaccgaccttgtgcagaagctggactacgagtgtgagctggctgtggtgctgggcaaagacgccaaggatgtgcccgccgggcagaccaaagactatgtgttcggctacaccatcctgaacgatgtctccgcccgggacgtgcagaccgcccacaagcagtggtacttcggcaaaagtctggacggctttacccccatggggccctgcatcgtcacggcggatgaatttgacacctatccgcccgcgctgcccatccgcagccgggtgaacggcgagctgcggcaggattccaacaccaagctgcaaatttttgatatcgaccatgtcatccacgagctttcgcagggcatgaccctgaaggccggtaccatcatcgccaccggcacccctgccggggtgggcatgggcatggacccgccgcagtttttgcacccgggcgacaccgtgcagtgcgagatcgaaggaattggcacgctgaccaacaccgtgcgctgaatctccttgtggaactgcccaaaattttacatggatttcagtccgattgcacgaaatgccgccgcagtactgctcttttgcggaaaaatatggtatactataaaatactgataaaaaatgcggcgcatccgcatcaaaggggtaaatgacatgaaggaatacgcatttggcatcgatctgggcggcactactgccaaggtcggcctgttcaccaccagcggcaagctgctggaaaagtgggaggtaagcaccgatacttccaataacggtgctcacattctggaaaatctggctgctgccgtgcagcagaagatgcaggaaaagggtctgtccgcagacaaggtcgagggtgtcggtctgggcgtgcccggcccggtgctggattccagcattgtgcccatcgtatgtgcgaaccttggcggctggggcaaccgcaacgtctccattgagctcagcgagctgctgggcggcatccgtgtgctggtgggcaacgacgccaacgtggctgcgctgggcgagatttggatgggcgcggcacagggctgccgcagcgccgtcatggtcacgctgggcaccggcgtgggcggcggtgtcatcgtgaacggcaaggtcatcgatggcgctcacggtgccggcggcgagatcggccacatcaccgtcaacccccacgagaccgccgtctgcggctgcggcaagcgcggctgtctggagcagtattccagcgccaccggcgttgtgcgctgcatgaagaagctgctggacgcaaacccggacaccgcctgcaccctgcgcggcaaggactttgaagccaaggacgtgttcgacgctgcccgcgccggggacgcactggctgcccgtgaggtggacgagatggcctccacgctgggcatggcactggccaatattgccgccaccaccgaccccgagatgtttatgatcggcggcggcgtggcccgcgccggggaggttctgttcaccccgctggtgcgccactacaaggagtacgccttccagtcctgcaaggagactcccatcaaggccgccagccttggcaacgacgccggcatctacggcgccgtgcgcctgatcgtgggtgcctgatcagggaataccgacagctttcaaaccagccaagcctgcgggcttggctggttttgtttttgcgggatatccctcccgtgaaaatagcgtttggagcgctccgcagagcgcgacaaacgcaaaatttaaaatattttttccgctgaacatggccagagcgcaagcggaggccattcaaaatcgtcctgcgccagagggagttcatctgcaggcggctgaggaggtactgcgtcttttttataaaaagcgttgcatatcggcgcaaaaaggcaactgccgtcttgtttattttgtgcatttatgctaaaatagcgtgcagatagttgatttttatagagtggtattactttttctgatgctgtaaaaattcggctgagccgaaaaaataaggacgcaacaaaggagaacacgccatgaaaaagcttttcgccatgacggtggccgtgctgctgctgttttcggtgctgctgggcattcccgccgcctatgggcaggcaccggagacaggcaaaacgctggacatcctgttcagccacgacacccactcccacctgaacacctttaccacggtggtggatgagaaggaagcagagatcggcggctttgcccgcgccaacaccctcatcaaggcgcagcgcgccaaagacccggacacccttgtgatcgacggcggtgacttttccatgggcaccctgatccagacggtgtttgaaacgcaggctgcagagctgcggatgctgggctacatgggctacgatgtgaccaccttcggcaaccacgagtttgattaccgctccaaggggcttgccaatatgcttaccagtgcccgcacctccggcgatgccgtcccggccatcgtggtctgcaatgtggactgggacgctatggaaagcgccggtcttaccgagggccagcagctgctcaaagacgcctttgccgcctacggcgtgcaggactacaccgtgttgcagaagggcgatgtgcgcattgccgtggtgggcgttttcggcaaggatgccctctcctgcgcacccacctgtgaactgaaattcaaggacccggtacaggcggtaaaagccaccgtggcagagatcaaggcgaacgaaaccgtggacatgatcgtctgcgtttcccacagcggcacatgggacgaccccaaaaagtctgaggacgagctgctggccaagggtgtgcccgagctcgaccttatcctcagcggccacacccacagccgtatccgggaacccatccggcacggggacacctatgtggtctcctgcggcgagtacggcaaaaatctgggcagcctgtccatggcgcaaaaagcggacggccgctggcaggtgaccgattaccagctgatccccatcacttccgatattcccgccgatgtggaaacgcaagaggtcatcgaccgctttatggacacggtggacgaggattatctggcgcagttcggctacaccaaggatcaggtgctggcagaaaacgatgttgttttctccagcctgaaagatctgggcaaggtgcacaccgagcacaatctgggtgatattatcgcggacgcctatgtgtacgcagtggagaacgccgccgactataacggcgtgccggtcgacttggcggtagtacccagcggcaccgtgcgcgacacctacgcccggggcgatatcacagtggagcaggtgttcaactccttctcgctgggcatcggcgcggacggcgtgccgggctatcccctcatcgaagtctacctcaccggtaaggaactgcgcaccgccgccgagattgacgcttccgtgtcggatttcatgaccaccgcgcggctgtattgcagcggcctgaactttacctataacccccaccggctgctgctgaacaaggtgacagatgtctatctggtcaaggacgggcagcgcgtggagctgcaggacgacaagctgtaccgcatcgtagcagatctttacagcgggcagatgctgagcgccgtgacggatatgtcctacggccttttgtccatcgtgccgaagtacgccgacggcacccccatcgaagattttgaggatgtgatcctgaccgaaaacggcaaagagctgaagggctgggacgccattgcgcggtacatggcctcgttcgaggacaccgacggcgacggcatcggcaacgtgccggactactacaacaccctgcacgaccgcaaaaaggtagaggacagccgcagcctttccgcgctgctgaaaaagcccaaccgctttgcctttatcctccttggtctgatcctcaccgtcattctgctggtggtgtgccttgtgctgctgctccgtaagctggtgcgcaagcttcgccgcagaagaaagacacattaaaatagcacaatgccggacagcctgcgggctgtccggcattgtattttcacaatcagaatctccccttctgcaagccttccagcacctcgtacaggtcgcagcactcggcggtgtacagacggcgcatctcgtcgttggcgggtgccatgtccggcaccatcacggtgacaaagccgccggcggcaccggcgcgcacgccgttgtagctgtcctccagcacaagggtgcggtcacgcgcagtgcccagcgcctccgctgcccgcagaaaaatttccgggttgggcttggaggccgagaactgctcgccggagacgatcaccttaaaatagtgggtcagaccccagccgtccaaatggtgccggatagacgccatccggctggaggaggccactgccatagggatgtgctgcgcatccagccatgtcagaatttcgtccagtccgggctttttgggcggcggtgcctgaaacgccttttccgcctgtgcgtgcagcgcctcgatgatggcgtccgtgtcgcagttttccccgtagaagcggcgcagcaccgcccgcatggtgtcccctgccgtgccgcgggcggcaacgtccagcccttccttataagaaagcccaagggtggcaagtgcaggctcccacagggtagcccagacccgctcggtgtcaaacatcaggccgtccatatcaaaaataacgctgtcgatcatggcagtatgctccttccgtagaaaagcggggctgtgccccgcaaaagtgctctgtgcccctattgtaccatagatttggcagtttgcacaccattgtgctcacaatctggtgcaactttaccggtggaaagatgaaacattttttgattccttgcaaaaccggcagggaatattataatagaaaccaacatttgtgtcataaagcgccggaaatcgtgcgcacgcgcataaaaggaaagagggaaactcactatgttggatatcaagatcacccgcacggctacgcccaaggcaaagcccaccgatgagacgaagctcggcttcggcaaaaagttctccgaccacatgttcgtcatggattacaccgagggtgagggctggcacgatgcccgcatcgtcccctatggtccctttgaactggaccccgctaccgtggtgttccactacgcacaggagatctttgagggcatgaaggcctaccgcactgccgacgacaccgtgcagctgttccgcccggactgcaacgccaagcgttttcaggattctgccgaccgtctgtgcatccccaagatcccggtagaggactacattcaggccgtcgaggctctggtggacgtggaccgcgactgggtaccccacaccgatggcgcttccctgtacatccgtcccttcatctttgccaatgatgtgggtctgggcgtgcacgcctccaagcactatatcttctgcatcatctgcgctccctccggtgcttactacgccgagggcatcaaccccgtgcgcatctatgtggaggacgagtacatccgcgccgccccgggtctgaccggctttaccaagtgcggcggcaactacgccgcttccatcaaggccggcgagctggccgaggagcagggctacgcacaggtgctgtggctggacggcgtggaaaagaagtacgttgaagaagttggcagcatgaacatcatgttcaagatcgacggcaaggtgtacactgccgctaccgtgggcaccgtgctgcccggcgtcacccgccgcagctgcatcgaactgctgaaggactggggctacgaggtcgttgagggcaagatcgccattgccgacatcatggctgctgcccgcgaaggcaagctggaagaggtgttcggcaccggcactgccgctgtcgtctcccctgtcaaggagctggtctggaagggcgagcacgccttcatcggcgacggcaagatcggccctgtcactcagaagctgtacgacaccatgaccggtatgcagtggggcaagctgcccgataccaagggctggatcgtgcctgtggaaaagaaatattgagccgcctgtcaccctacggcttttaaagggactgctgcataccgtctggggcagcagtccctttgctctataatcattgcaattcccgccgcatggtgctacactacctataaagggcgtgggcttgccgcctatgccccttgcaggaagatttgagaggaaagaagcaccatgatcaaaaaatggagcatgagttatccggcggtcaacggcaccgaacagcgccgggcgtatgtctatctgcccaccatgtacgaggcacagccggagcgccggtttcccgtgctgtatatgttcgatgggcagaacgtgtttttcaacgaggatgccacctacggcaaaagctggggcgtggcagattatctggactataccgacaccccgctgatcgtggcggccatcgagtgcaacgccggggcgaacaacgagcgtctggtggagtattccccctaccgcttcgatgaccccacctacggccactttgacggcaagggacaggccactatgagctggttcatccaccggttcaagcccctgatcgaccagaatttccgcaccctgccggacagggcacatacctttatcggcggcagcagcatgggcgggctgatgagcctgtacgctctgctgcaatataacgatacttacagccgcgcagcggcgctgtcgccctccatctgggtggcaccggataagctttccggccttgtggggcgcgcaaagcttgcccccggcacagtgctgtacatggactatggctcccgtgagatgggcaaccacgatggcatccgccgggaattctccaacttgagcggcaagctgatgacccggggcatccacctgaccagccgcatcgtgcccggcggcacccactgcgaggccagctgggaaaaacagctgcccttcgtgttccacaccctgctgtatgaggtggaggaataaaagaaggggtgccccgataccatataaccacaccaaaggaggaaacaccatggagatgcagtatttcaaggagtacagcccggagctgggacgggatatggagtgcaagctttacggccacgcaggccgcccgatgctgtatattccctgtcaggacggccgattcttcgattttgaaaacttccacatgaccgacacccttgccccgtggatcgagtccgggcagatcatggtgctttccatcgacaccatggatcaggaaacatggtcggacgcacagggcaacccctactggcgtatccgccgctatgaacagtggctgcgctacatcacccgcgaggtcgccccgatgcttcagcatctggcgcagcagcgcaacggctggagcgacctgcccggtgtcatcgccttcgggtgcagtctgggcgccacccacgcggtaaacctgtacctgcgccgcccggatatcttctgcggctgtctggcactcagcggcatctacactgctcactacggctttggcgactatatggacgagctggtgtacatgaactcccccgtggactatatgaagaacttcccggagaatcacccctatatgcagctgttccgcagccagaaagctgtcatctgctgcggtcagggcgactgggaacagccggacaccacatggctgctcaagcgcatctttgaagcaaagcatatccccatctgggtagacctgtggggtcacgatgtcaaccacgactggaactggtggtacaagcaggtggcgtattatatgccctacattctgggccagcagtgacccatcccgtgaaaacgaaacaacggcgcgtccatggacgcgccgttgtttcccaatattaaagtctgtcccgccccgcaggggcattgcaatcatagaggtaacggaaagaggaatcaacaaatactatgcagaactttatttttatctcccccaacttccccacgaactactggcagttctgccgggagctgaagaacaacggcctgaacgtgctgggcatcggcgaccagccctacgaagagctgaagccggagctgaaggcaagcctgaacgagtactacaaggtgaacagtctggaaaactacgatgaggtataccgcgccgtggcctttttcaccttcaagtatggccgcatcgactggctggagtccaacaatgaatactggctggaacgggatgccgctctgcgcaccgatttccacatcaccagcggtttccagacctctgatatgccccgcatcaagtacaagagcaagatgaaggagtactatcagaaggccggtatcgccaccgcccgctaccacatggtggatgaccttgcgggctgcaaggcctttgtggcgcaggtgggctacccggtggtagtcaagccggacaacggcgtgggcgcttcggatacccaccgcctttccaccgacaaggaactggaagaatttctggcttacaaggagaaagagcacccggatgtggcttacatcatggaggagttcgtccgcgccgaggtgaacagctacgatgccatcatcgatgcccacggcaaccccatctttgaggcgggcaacgtgagccccgtgtccatcatggacatcgtgaacaacgatgacaactccatctactacatcatcaaggatctgccggaggacacccgcgctgcgggccgtgccgccgtcaagagctttggggtgaagagccgctttgtccacttcgagttcttccgcatgaccgagaatcagtccagcatgggcaaaaagggtcaaatcgtggcgctggaagtcaacatgcgtccctgcggcggctttaccccggacatgatcgactttgcccgctccaccaacgtgtacaagatctgggcggacatgatcgctttcggcggcaccgatatgccggtgggtgagcactactactgcgcctttgccggccgccgggatggcaagagcttcgtttacagccacgagcagctgatgcagaagtatcaggacaacatgcgcatggtggaccgcatccccgaggcactgtccggtgccatgggcaaccagatgtatgtggccaccttctccacccgtgacgagatggaaaagttttattccgatgtgctggccgtcaccgacgccaccaacgccaaggtgcaggccgagttgacgaaggtgctggctctgggtgagccggagacggtaaaggctgagaaataattggtgtgctggagtgcgctcccccataagcgtcctcgccctctccgtcacggcttgcgccgtgccacctctcccaaagggagaggctctggcgaaaccgcacactttgcacttgaatcggaaactgtaccgttatgccaagggctctccctttgaggaaagacttcccccgttccgggggaagatgtcgcacagcgacaaaagggggaatctgtcaccgaaggtgactgagagggcgagcccgctgccctcccgtgaaaacacaagcccggaaagtccgcagactttccgggcttgttctaatttattacacttttgcagcgccacgctccagaataccgttgaagcgggagaagaaggtgatggtggtaatggtagccgccagaatatcgctgaccggctctgccagaaaaacaccgaataccgggtccggcagcaggtgcggcaggatgaagatgagcgggatcagcaaaatgatcttgcgcagacaggccagcagcaagctgaccttggcctgacccagcgccataaagctctgctggcaggcgatctggaagcccatggcaaagataccggccatgtagatgcgcatggaccatgtggtgtagtcgatcagcgccgtatccgaggtgaagatgcccgccacagcccccggcgccagcatcatgagcagccagaacagacaggtgtagcagctgcacagcagcagctggaagcggaacgcctccttgacgcgggactttttgcccgcgccgaaattgaagctcatcaccggctgaccgccctgacagatgccctgaatgggcagggtgcacagctgggaagcgctggtgatgacggtcatggcacccacagccacgtcgccgccgtaccgcgccagactggagctgaagctgatggacagcaggctctcagtggacatcatcacaaaggtggagacgcccagcgccatcaccggcagaatgaccttcttttccgggcgcatatagtccttgcgcaggcgcaggatggtctttttgccggtgaggaagtgcaggatccacaccgcgcccacagcctgactgagcacggtggcaatggcagcgccccgcacgcccagacccagaccaaagatcaagatggggtcgagaataatgttgatgaccgcaccgatgacggtggtaagcatactggtcttggcaaagccctgcgtggtgatgaaggggttcatgcccagcaccagcagcacaaacaccgagcccagaatgtagatgcggctgtacgccagcgcatagggcaaggtggcgtcactggcaccaaagagccgcagcagggtgggtgccccggcgtagaacaccacggtcagcaccaccgagaagagcagcagcatggtaaaactgttggagatgatcttctctgcctgctccttgtcgccctgtcccagcgcaatggcggtgcggggtgcgccgcccgcgcccaccagcatggcgaatgcgttcagcagcataaggatgggggtgaacagtcccacgccggtcagcgctgccgcgccgatgccggcaatatgtccgatgtaaatgcggtccacgatgttatacagcaggttgaccacctgtgcaacgaccgccgggatcatgagctgcagcatcagcttttttacgctgccagagcccatatcctgttttgcctgtgccatggaagtgattctccttttacttcaaatttgaactatctattatattatactcaaaacccgcaaaaataccagtccctttttgcaaaattttccgtgctgcgcaaaaaagcgtgtttctcccctgccgccgtaccggtcttgccgctgcgtaccctttgcggtgcagcattccgggcggcagcggcctttgcatccaagttttcggcgatatgtctgtaaaaaagcaaggtttttcgtcaggtttgtgtcttgtgcacagcggcatttttcagtacaataaagaggcagagaagaaaaataagcgctgcgaccggaacgggttgccgcgctgttttgtattttgcggcgcagctgcgcccggtgaaaaaaggagtgctgtacaatgatcaacatggtcaagcttcccaccagcaaaagcgaactgttcctgcgggtggccaagggacattttgccaccagccacagccacatcaactattacatcgacgtgaccacccaaaagacccgcctttccgaggcaaaagccgtggcaaaggagctggtcagcgcttaccagcacaacaccatcgtggataccgtgctctgcttggacggcacacaggtcattggcacctgccttgccaacgagctgaccaaggacggctttaccaatatgaacgcccacaagaccatctacatcgtcaccccggaatacacctccggcagccagatcattctgcgggataatcttgctcccatggtcaagggcaagcacgtcctcattctggcggcatccatcaccaccggctacaccattcaggcagccgtggaagccgtgaactactacggcggcatcgtggccgggctttcggcgattttcgccaccacccacgagtgcctcggctacccggtcacctccatcttcgaccccaccagtctgccggattacgccagcttcgactcccgcgactgccccctgtgcaaggccgggcagcacattgacgcgctggtaaacagcttcggctactcggcgctgtaagcaaagcggaaagtatgttttatcagccgttccgaagtgcctgcgggcgtttcggaacggcttttttcaggagaagccgcgccccattttcgtcaaaacaacaaaaatctcaatggctttttgtgatgttgccaaaatttcccacattgcttgacaacgcttttttgatacgataccatagacccagaaagcgagtttgggacgccttgaacaacattacaggaggtatttatagcatgaaactgtacaaaaaagcggcagcctgtctgctgaccgcagccatggcaatttctatgctgaccgcttgcggcggtggcggcaacggcggcaacggcggcaacggcggtggcaacactcccagccccctgcccaacaaccctgaccagatcattctgcctgacatcgacgagggcgaaggcggcagcgagggcaccgggaccaagcccaccaagacccccattatcgatgtgaacaacagcaagctggtacagttcaccaagaaatacgccggtgctacggagttctatgttgaaatgcaggaagtcggctatggcaaggacgcacgttccatcgatgtacgtgctgcccggaagggtgagaactgctatgtgagcatggctacgttgggcaagaataacaaacagcagcttatcgagactctgatgctcaagaataattcgacttgggatcagtacctgcttttccgcagcagcaaggcagccgtcaagtcacgtagcgaggatgacattgatctgtctctgggcgctctcatcgcgtccaagcggcccactcagatgtggtctaccgagataaaggtaggtccgaccaagtattatgccgaggtctataagtactacccctacgagtataccacctgctttactgcagacggcaaacctgtttatcagtttgtaagagatctccgtgaaaagcagctcgatagcgccactctgtacaagaccattcgggtcggttccggcaccagcaatggtctgtgcgcgctgcccaccggcaccaaggcctatagctttgatgacaataccggcagcctcaccgatgcaaagggtaacgtattcactctgaaagaggacggtaccactggcattaaggtttatgataaggccggcaatgaggtcaccgacgacttcaagtggttgaccgatttcttcaagatgatgtccggggaataagccctgtgaccgtaattttccacacacagcctacgtcccataacgcgtaatatcgtgacccaaggagctgccgcacccaagcggcagctcctttttgttgtcccacgggcgggattgtgctatactgataccagacgaaactaggagaacgaggtatcaaatccatgaaaattcccgcaaacggttttacccacgccggcaagttccatgccgacgacgtgtttgctacggcgctattgcaaattctgcgcccggatatcaagatcacccgcggctttaccgtgcctgacgattttgacggcatcgtgtacgatatcggctttgggatgttcgaccaccatcaggagccccgggagtaccgccctaacggcgtgccctacgcggcctttggtctgctgtggcgggtgcttggcccgggtcttgtgggcgagcggcaggcgcggctcattgacgaaaacttcatccagccgctggacctgaacgacaacaccggcgagcagaacagcctgtgcgatgccatcggctttttcaacccggtgtgggactccaaggaggatcaggacagctgctttttcaaggcggtggctgtggcaaagcagatcctggagaaccagatcgacagcgccaacgccgtgaaccgcgcggacgaaaaggtgcagcaggcctaccgcaactcccgcgacggcatcgtggtgctgccctgctatctgccgtggaaaaacggcctgtacaagaccgatgccctgtttgtggtgtaccccagccagcgcggcgggtggagcgcccagtgcgtcaccgaccacaagaccaaaaagtccaagctgcccttcccgcagtcttgggcggggcagccgcaggaggtcatcgagcagaagagcggcatcccgggcatcagcttctgccacgccagccgcttcctcatcaccgccaaggacaaggagaccgcccttgcagcctgccgtcaggtgctgaaaaataatggacgccttgcctgacgtcgcctacgtctatatggtgcgctgcaccggcgggcagctgtacaccggttggacgaaccaccccgccgcccggctgaaagcgcaccagagcggcaagggcgcgcgctacacccgcgcccacggcgcggtgggctttgcctatctggagcgctgcgcggacaagcgcgccgccctgcgccgggaagccgccctgaaaaagctttccaagccggaaaaagaggtgctgtgcgccgcatggcgcgccgccgggtgccccggggtgcagaacgattgaaaatgccctccgcttgcgctctgggcattttcagcggaagaattattttaattttcgggatagcggagcgtctgcggacgctccgctatcccattttcacgggtggggtcgtaatggcaaacggcatttacagcgcctgcttcctgcggaagcggcggcgctgcggggaatcccctcctacacaacgcagcaaggccgtccggcattcgccggacggccttgctgcacttattggaaaggatcgatcaggagatggcaattgttatttcgccagacccagctttttcagccggttccatgcgcggatgacctgtaccttggtcacacgcttgccgggcgtaaaggcgccctcgcccatgtcgggcagcagcccggcttccacagcccagcgggctgccttggcggtgtcgggcggggcgctctgggcaagggcgggcagcggcattgcggtcagtgccatgctcagcgccagaaccatgctgatgagccgtttttgcataagattctctccttctcaagcgccctccaagccgggcgcttttgttgtacccagtgtaccacgttttgcccgctttggacggttttgggcacgaatcgccccgcaaatgcgctgaaacgacccggtgcaccacacgcacccgcaaaaaacagaaaaccgcccggtttgcggttaccggacggttttctgctctataggaattacgggaatggcatattgaacagagcactgctctgtgtctgtagtataccacgaacggcggcaaaagtagagcaattctgcgtgaatggcccctgaaatgcatcgaatcgccctgaaaaaccccaaaaaagcccttgcgcacccttttgggacgcaaaaaaagggttgcaaacgaatgtgcgcctgagaggctttccaccgcaatctctcccataaaaaagcagttccggaacgcccgcaggcgtttcggaactgctataaaaatattctttccgctctttatgcccaaagtgcaacgacgacgaccgccgccagcggcggaaacagggaggagttgctgggtgccgcaacccgatagcggcgggcattcaaaatcgttttacttgcccgccagcagcaccgccagcacggctttctggacgtgcagacggttctctgcctcgtcaaagatctcatccgcgtgctgctcgaacagggcggtggagatctcctcgccccggtgggcgggcagacagtgcagcaccagcgcgtccggctttgcgttttccagcagacggccggtgagctgaaagcccacaaaatcccgcagacgctgctcgctctcggcagtgccgggggcggtggtgttccatgcggcagtagctacgatgtccgcgtcccgcagaccctcggcggggtcggtggtcaggtggaaggcattgccgtatttgtgggcaaatatcagcacatccgctgccgggcggtagcccggaggacagacgcaggatacctgcatccccgccaaaaggccgcccacgatcaaactgtttgccatgttgctgccgtcgcccacaaagcagagcttcagccctgccagcgtgccccggcgctcccggatggtcatcaggtcagccagcacctgacaggggtgtgcgtagtcggtcaggccgttgatcaccggaatgccggaaagctcggccagctcctccaagtcccgctggcggtaggtgcgccagacggcgcagtcgtagtagcgccccagcacccgggcggtgtcccgcaaaggctcgccccgcccggcctgcagctcggcggtgttcatatagttgccaagaccacccatctggtacacgcccacctcaaagctggtgcgggtgcgggtggacgctttggaaaacaggagcgccacgcttttgcccgccagcagcggggcggtgcggcccgccttgcagtccgctttcagctggtctgccacatccagaatgtgggtcagctcggcgggggaaaggtcgctcattttcagcagatttttcatgcctgctccttcggagccgtcggctccatcgtgcccagcacctcggccagcacctccagcgccatgtctacttcgtgctcggagacggtcagcggcggcagcagacgcagccgggtctttgcggtaagcaccagcaggcccttttcgcggcaggcagccagcacatccgcagcctgcacatcaaagaattcgatacccaccatcaggccgatgccggaaatgttcttgacgtggggcagctttgccaggccggtgcgcagctgtacggcgcgctcgctgacctgcgcaaggaagctctggtccagacggtccaccaccacgttggcaccggcgcagaccaccgggttgccgccaaaggtagagccgtgggtgccggggcccatgccctcggctactttttcattcatcagcaccgcgccgatgggcaagccgccgcccagtcccttggcaagggtgacgatgtccggcttgaggttatagtgctcgcagcacaggaaggtgccggtacggcctacgccggtctgcacctcgtccacgatgagcacaaggtctttttcgtcgcacaaagcgcgcacggcctgtacatagtccgggtccagcgccatcacgccgccctcaccctgaatcagttccatcatcacggcgcaggtgtggcggtccaccagttcccgcagcgcttcgatatcccccgccgggacgtactggaagccttcgttgaaggggccgaagtagttgtggaacacctcctgcccggtggcggtcagagtggcaagggtgcggccatggaagctgttgaccatcgtgatgacgttgtagcggtccttgccgtaatggtctacgctgtacttgcgggcggccttgatagcgccctcgttggcttcagcaccggagttgccgaagaaaaccttgctcatgccggtgcgcttgcacagctttttggcaagcttgccgcagggtgcagtgtagtacaggttagaggtgtgctgcaatttgtgtgcctgctgggacacagcctctgcccatgcaaggtcgcagtagccaaggctgttcaccccgatgccgctggtgaagtccagatacttctgtccctccgggccctcggcgtacagcccgtggcctttttccagcacgatgggattgcggttataggtgtgcaggacgtactcgttgtcccgcttgatgactttttcagaatccataggtgtacctcctgtgaatagaagttccgcgcatgcgctgctcccccggagggagcgttttttctattataatactgctttttcgcttgcgcaatctttttattcgcggtggctgcggcggtaaaagcgggtaccggagccgcggtcggagaacagttccagcaggatggagtgcggcacacggccatcaatgatgactgcttcgtgcacgccctgatagatagcatctgccatgccgccgatcttggggatcatgccgcctgcaatgatgccggcggacttgtagccctcgatctcggtcacctctacctcggggatgagggtggtctcgtcctccttatcccgcagcagacccgcgatatcggtcatggacaccagcttttcggccttgagggcaatggcgatctgggccgcagcggtgtccgcgttgatgttgtacgcctgcccgaggtcgtccatgcccacggtggcgatcaccgggataaagccgccgtccagcaggctttcgatcagggtcgcatccacatggacgatctcgcccacatgacccagctgcgggtccagctcggtgcagcggagcatctgtccgtccatgccgcacagacccacgccgcgcccgcgcagctttgccacaaggtccttgtttaccttaccggccagcacctgctgcacgatctccatggtggcatcgtccgtcacccgcagaccgtttgcaaagtggctttccacgcccaccttcttgagcatctcgttgatggcggggccgccgccgtgcaccagcactacccgcacgcccagcagcgtcagggtgacaaggtcgttcatcacggcgtttttcagcgtctcgttgatcatggcgttgccgccgtacttgatgaccatggttctgccatggtacttttggatataaggggtggcctccgaaaaaagccgcgccatttcttcgtttttcatctgttccgcgctcctgtcaggttctgtaatcgccgttgatcttcacatagtcgtaggtcaggtcacagccccatgccttggcgcttgcctcgccggtgcccatatccaccttgaccagaatatcgtgctctgccagcaccttggcggcttcatcctcgctgtacgggtggtaggcggcgttctcgcacacatacacctcgcccgccttgctggaaagccagacgcagaccttatcaatggagaaatcgccgggggtgtagccgatggcgcacaggatgcgtccccagttggcatcgcggccaaagaccgccgccttgaacaggttggagcagaccacactgcggctgacggcgcgggcggttttcaggtcgggtgcgtgggtcacttcgcaggtgatcaggtgggtagcaccttcgccgtctccggcgtgctcggcgcacatgtgctctgcaatggcggtcagcgctgccacaaaagcggcgtaatcagcgttttcctcgcagatctccgggttgcccgccagaccggacgccataataataagggtatcgttggtggaggtgtccagatccacgctcatctggttataggtgccgggcactaccgtcttgagcgccttttccagcagcgcgggcgagacggcggcgtccgtggtgtagaatgccagcatggtagccatattgggggcgatcatgccgctgcccttgccgatggcacccacggtgcacaccttgccgcccagctcgaactggatggcgtactcctttttatgggtgtcggtggtcatgatggcggtggcagcgtccgtgctgccctgcgcggtggcagccagcttttccgctgccgccgggatgccccgggcaaaggggtcgatgaccatgggctgaccgatgacgccggtggaggcgggcagaacgtccttttcgtccatgttcagcgccttgcctaccagtgcacagcactcctctgccagcgccacgccgttggcggcgcaggtgttggcgttgccgctgtttaccacaatggcctgtgcatagccatcggccagatgggcgcggtccaccttgatgggcgcaccgcagaccttgttggtggtgtacacgcccgcagcagcgcagcgcacctcggccttgatgagcgccagatcgtatttttcgctgtgattttcccggatgccgcaatggacaccggcggcggcaaagcccttgggcgcgcagatgccgcccgcaacttccttatactgcattttacttcccccatcgttcagcatacgccctcatcagtcaccttcggtgacagcttcccccggccgggggaagccttttacttctgccgggtacgctgattctttttcatcagcaccctcttataaagccttcccccagacgggggaaggtgtcattgcgccagcaatgacggatgagggtgtattgttattccaagcccttcgtctcttccagacccagcatcaggttcatgcactggacagcggcaccggaggagcccttgcccagattatcaaacagcgagaccagcatcatttgatctcccgcggcgttcacggtcaggtacagttccatgcggtcggtgcccgccatggcgttggagtacagaccgttttccggcagcggctcgttcaggccgtgcactttgacggtggcggcgtccttgtagtaatccgcaagggcggcagccacggcctcggcggtagtgcccgcaagagtaagatccagcggcaccagcacctgcatgccgcagtagtagtcgcacaccaccggcacgaacatcggcgtgtgcgcaaggccgctaatcttctgcatctccggcaggtgcttgtggccaaggctcaggccgtagctcttaggcgcatccagcttgctgtgcgccgggcggtcggggctttcgtagtccgcgatcatctttttgccgccgccggagtagccggagatgccggtgcagctgaaggggtagctttgcggcaccagccccagctccaccagcgggcgggcaatgctgataaagccgctggcatagcagccgggcactgccacgcggtaagagttctgaatttttgccttctgccccttcagttccgggaagccgtagtcccatgcggcatcggtgcggaaggcggtggaggtgtccaacaccttcacgtccgggcgcagcaggggcatgacttctttagaagctgcatccggcaggcagaggaaggcaaggtcggcagaattgatgacctttgcccgctcgtgcacgtccttgcgcccttcggcagagatggacagcagttcgatctccggccgttcggccagacggtcggcaatgcgcaggccggtggtaccggaagagccatcaataaatacctttaccttcatgcgttttcctcctcccatgcgtccagccgtgccgttgccagcgcgatctgcttttctacgctggcggcgctggggccgccgtagctggtgcgtccctcgcagcagtgcacaaggtcgatggcatcatagatatcggccccgaacagcgggctgtaactctggaactgggtcagggtcagctcctccagcgttttgtcggcggcaatgcagtccgacaccatgcagccggtcagcttgtaggcatcccggaagggcattccctttttggtcaggtagtcggcgcagtcagtggcgttgataaagccctttgcggcggcgcggcgcatattggcgggcagggtcttcatggtgtccagcatgggggtgatggtcttgaggcagagttccaaggtgtccactgcatcaaagatggcttccttgtcctcctgcatgtccttgttgtaggccagcggcaggcccttcatcatcaccagcagggtgttcaggtcgccgtacacccggccggtcttgccgcggatcagctccgtgacatccgggttcttcttctggggcataatggacgagccggtggtaaaggcatcgtccagctcaatgaacttgaactcccagctgcaccacaggatgatttcctccgaaaggcgggacaggtgcatcatgcagatggaaatggcgcttgccagctcgatgcagaaatcacggtcggacacgccgtccagactgttggcgcaaggggcagcgaagcccagcttttcggcggtgaaatcccggtccagcgggtaggtggtgcctgccagtgcgccagaacccagcgggcactggctgtccatgcgggcggtggcgtccgcaaaacggtcaaggtcgcgcagcagcatggaagcataggccatcagcgcgtggccgaaggtgatgggctgggcgcgctgcaggtgggtgtagccgggcatgacggaggcggtgttctccgctgcctttttgcacagcacccgcaccagctccacgatataggcctgcaaagtcttgctgtaatcccgcaaagtcaggcggatatccagcgccacctgatcgttgcggctgcggccggtgtgcagccgcttgcccgcatccccgatgcgggcggtcagggtctgctccacaaaggtgtgcacgtcctcggcggcgggatcaatggtcagcgcaccgctggacaggtcgtccgcgatggaagccagaccgctgaggatatccgcacagtcctgctccgagatgatgccctgccgtgccagcatggcggcatggacgccgctgccgcgcatatcctgcgcgatcatccgctggtcgaagcggatggaggagttgaagtcgttgacgcggctgtccaccgccttggaaaaccgacccttccagagttgttctgccataatataaactccttataaaaacggcaaagccgccgcaggggaaaacgctcctgcggcggtgccgccggctacgatgccggtgtgagaacccgcgtgtgaaagtgtgaaaacacacgcagtcgaaaatgttgcgattacttgacctccggccagttcttggacagctttgcgcgctccttgatggacagaccgaacaggttgatgaagcctgcggcatcggcctgattgtagtcctcgtcctcaccaaaggaagcggtctgctcgtcgtacagggtgtacggagaggtgacgccggcgttgatcatgttgcccttgtagagcttcagcttcacatcgccggtcacggtcttttccagactattggcaaaggcatccagtgcctcgcgcagcggggtgaaccactggccgttgtacacgatgtcggcgtacttctgtgccagctgtgccttgaaatgagagctttccttgtccagcgtgatggtctccagcacgtcgatggccttgtacaggatggcgccgccgggagtctcgtacacgccgcggctcttcatgcccaccagacggttctccacgatgtccagcagaccaatgccgtttgcgccgcccagcttattcaggtactccaccagctccacagcgcccatctccttgccgtccacagcggtgggaacgcccttttcaaagtggatggtcacataggtgggcacatcgggtgcctgctcggggctgacgcccagttccaggaagccgggcttattgtactggggctcgttggcggggcattccagatccagaccctcgtggctcagatgccacaggttcttgtccttggagtagttggtctcgcggttgatcttcaggggaatgtggtgcgcctcggcgtagtcgatctcctcgtcacggctcttgatgtcccactcacgccacggagcgatgatggccatatccgggcacagtgccttgagggtcagctcaaaacgcacctgatcgttgcccttgccggtgcagccgtggcagatggcatctgcaccctccttgatggcgatatctgccagtgccttggcgatgcacggacgtgcaaagctggtgcccagcaggtagtcctcgtacttagcgccgaacttcagggtggggaagatgtagttctccacaaagtccttcttcaggtccagcacatacagcttggatgcgccggtagccttggccttttcttccagaccgtccagctcggtgccctgacccacatcaccggaaacagcaacgacctcgcagttgttgtagttttccttcagccagggaatgatgatggaggtatccagaccgccggagtaagccagcacgacttttttgatgttttcctttttcatgataaacgcgctcctttaataaaaatacacttttgttctctgatgcgcatttccattcgcatcctctgtctttcgtttgcggttgatgcttttattatacgcagcgcgggttttccgtcaatgctaaaaactgccaaacatagcgcccgtttcgcttttcttttggttcaatctgtatctttatgcaaatagttataaatatatgcgtattttatgcaatctgagtgtattttttcatggggttttgcgggagtaaaccctctccgtcatcgctgcgcgatgccacctcccccgaaagggggaggttttacgccgcaaagcggcagatgcaaaaagctcccccctcgggggagctgtcgagcatatgcgagactgagagggttcgtcccccgcaaaacaaaccaccggagcatccgcagacgctccggtggtttgactataactatttagttcagcttcaaatcgccgtccttgatccagcccagcttgcgctccacctcgcagaacaccacgctgagcacggcgggcagtacaaagcacagcagcaccatggcagcccagtccatgggggtgatggcagccttggtaccggcggcaatatcgctgacccagccggtgtagacgccgatctgccccaccagaccgcaggtgcccatgccggaggagaccgccgcgccgttcatctcaaagtggaacagacaggtagccagcgggccggtgatggcactggccagcgtgggggcgatccagatgcggggattcttgatgatgttgcccatctgcagcatactggtgcccagcccctgactgacaaggccgcctacaccgttctccttgtaactcatcacggcaaagcccaccatctgggcgcagcagcctgccacggcagcgccgcctgcaaggccggtcagacccagtgcggcgcagatagcagcggaggagatgggcagggtcagtgccacgcccacgatgaccgacaccagaatgcccatgaccagcggagcctgctcggtggcccacataataagagtgcccacctgacttgcggctgcgccgatgggggcggcgatgagcatggaaagcccgacgcccgcaaaaatggtcaccagcggggtgacaaggatatccaccttggtctccttgctcacggccttgcccagctctgccgccgcgatggcaatgatgagcacagccagcgggccgcctgcgccgcccagcgcattggccgagtagcccacggtgatcaggctgaacagcaccagcggcgggcagtgcagtgcccagccgatggcacaggccatggcggggccgctcatggcagtggcgtagccgcccagatccaccagcagggcaagaccggtctgctgacccaccgtcttgatgatggtgccgatcagcaggctggcgaacagaccctgtgccattgcgcccagcgcgtcaatgaggtaacgctgcggagagatgacgatatccttccgcaccaaaaattctttcagcttcgacataaaacttgcctttctatccaaaacagatcgttaaggttacaaacgtatgtcctgtatcataccatacacctgtcaagacagcaaggggttgctggaaaaattgtgaaatttcggctttgtgcaatgttctgccctgccggaacgtattccatttggaatattttccgacacactgccccggtggagaatttgtgtagaagcccgctgtgccgttgacggctccccgcgtgcgggtgtatactagaggaagcgtaaagttatcatccgccgtcctttttatcctgaacccatgggcggcgtggaataaaagcgggcccgccccgggcaaggggcaaagacccggtgcagcacagcgctgcatcaccgggagattcggaggcagagacgacagatgaaaaagcgatttgaccgatccggcacagcccgccgcaaggcggtgacagccgttgcagcgctgaccatggcgctggttctggctgtgggcggcgcaggggcagcgaccctgctgtctgcacggccggaaactttgaccgtgggcgcggtcgtgccccacatcaccgccgaagcaccgcagcagactgctccggctgaccctgccccggcagcggagagcacggcgactgccccggagcagacagcggaaagcaccgcgcagccgcagcaggccgagtctgtcccggaacaagcagaaaaaccggaaaccgccgaagcggaaccggctgagccggaagaagctgctgcagcaccggaaacgccggaaacaccggcacagcccgccggggacgccgcgctggaggaggagaactcccctgccatgctgctggaggagaccccggagctggccgcgcaggacccgcaggctcccgcagcggacggcaccgcccagaacgacaccaccagccagcacaccccggagggcagcgtactgctgaccccggaacagatccagcaggcgctggattccggcgcgctggaagatgccgaggcgcagtgcatcgacctgactgacgaaaacggctttttccggtggctgttcaactggctgttcggcagcaaggataaggaagaggaaccggctccggcctactccggctggcgcaccgagaacggcaagacctactactatgcgcaggacaccaacaaaaaggtcaccggtctgcgctccattgacggcaagctgtattatttcgatgccaacggcgttaaacaggacaacgtgacctttggcatcgatgtgtccaagtatcagtccgggctggactggaacaagatcaaaaagtccggcgtgagcttcgtcatcatccgcatcggctaccggggctacggcgctgcgggaaatctggtcaaggatcccatgttcgaggagcactttaccaacgcccgcaacgcggggttgaaggtgggcgtgtatttctttacgcaggccgtgaacgaggccgaggcacaggaggaggccgaggcctgcaactgggcactgaacggccggatgctggactaccccatcttctatgacaccgaggcttccaccgccccgggcggcaccggccgcgccgacggtctgggcgctgaggaccgtaccaagtgcgccattgccttctgcgagcgggtgaaggagctgggctacaagcccggcgtgtacgcctccaccacatggtaccgcaagcgggtaaattacaacaccctgcgcagccgctacaccatctggaacgcccactacggcgtctcctccagccccatcggctgtgacctgtggcagggcaccgagaaggctcgcatcaacggttacagcggcgagctggacgccaatatcagctatatcgggtaaaagagactaaacacccccggtcagggcttgcgccgctgaccgggggtgtttttatcatactgtcctgtttttgtgcataagctggtggcagagtatgcaagcgcaaatggcggggaggcatggggatatgtttgtggtcacactgagcaagacgagcctgaaaaaactgggagcaggggcggcgtgctgcgcgctggtggtgttcagcgccatgctggggcggttcatcagtacccggacggtggcggtggctgccccggtgaaccgtatcgagagcgcacaggacatccagacatggttcaccggctacgggctggaggtggacggcgcgtccatcacggcggataaggtcaagatcccccgcaggtgggacgacagtttttctgccttcaacggggtggtgcagcagagcggcatggatcttgcccgctacaagggcaaaacggtggaaaaatggtcggcgctgctcccggcggcaagcaacggcgagaccagccgctacggagtgctgctggtgtataaaaagaaggccgtgggcgcgtatctgctggaaaaaccttccggcacggtgcttggactgcaggacgctcagaacgaactggcaaagcagacttccggcgaggattacagcggcgactggggcgagcggcacgacgagcagctgaccgacagcaccgcacagcagacctccggcgaaccggagacagagcccgaagccgccccgcaggcagcgccctacaccgagctgccgctggacgcagaagggtatcccgtggaatagggacggtatttcaggaaaaaacgacctttttaagctcttgtccggcagttgcacaaactgcctagtttttacaaacgattcgacaaaaattagacaaaacacggatttttgtagcatccgtatgttcaaatataacaaaaaattcttgtaaaaatcggcaatatgaaacggtgcaaaaaaaccggtacgggtttataataatagtataccgatccccattggcaaagctatgttccggggctgaatgtgcagcccgggcagagggatcaagtagtaaggagaaaatgattatgaaggaatttcagtacactattaaggatgcctgcggcatccatgcccgtcccgccggcctgctggtcaagaccgtgaagggctttgcaagcaccgccaccctcgagaaggacggcaagagctgcgatatgcgcaagctgatggctctgatgggcatgggcgtcaagcagggcgagaccgtgaccatcaaggtcgaaggcgatgatgaagaagcagccgcagaggcaatccagaagttcctgagcgagaacgtctgagccgcgacttgaaagccgagccctcgcgggaaaactgcgggggctttttttaacaaaacgccgggcgctgcacgcccggctgtaagtggaaggagaacgtgctatgcaggtaggcaccggcaaaagcgtactcaatggcatcgccattggcaagctgaagatctacaagaaaaaagataccgcgatttccaccgcccctgtggcagatactgccgcagagctggagcgttttgaagctgcccgccagaaggccattgagcagcagaccgccctgtatgaaaaggcactggcagaagccggcgaggacatcgccgaggtgttcaacatccacgccatgatgctggatgatgacgactttgtggacgccatcaaggagatcatcaacgggcagaagatgtgcgccgagtacgccgtcaagaccgccggcaacaatcaggctgcagtgttctctgccatggacgacccgtatctgcaggcccgcagcgccgatgtgctggacattgcgcaggccatgctggacattctgcagggggtggacaacgcttccctgcagggcaccgagcccagcattctggtagccgaggatctggctccctccgagaccgtgcgcatggataaaagcctgctgctgggcttcatcacccgcgagggcagctccaacagccacaccgccattctggcacgcagcatgaacatccccgccctgatccagtgcaaggacattcaggacgactgggacggcaagatggctgtggtggacggctacaacgcctgtgtgtatgtggaccccacccccgacctgctcaagagcctgaaaaagcgccagcaggaggaccagaaaaagcaggccctgctgcaggagctgaagggcaagcccaacaccacgctggacggcaagaccatcaacgtgtttgccaacatcggcggcatgggcgacgtgggcgctgtgcagcagaacgacgccggcggcgtgggtctgttccgcaccgagttcgtctacctgaactgcaaggacttccccaccgaagactaccagttcgaggcttacaagcaggtgttggaaagccttgcaccccgcaaggtggtggtgcgcacctgtgatatcggcgcagacaagaccgtggattatatgaagctggatcacgaggataaccccgcgctgggctaccgcgccatccgcatctgcctgacccgcaaggactttttcaagacccagctgcgtgctctgctgcgtgcttccgcctacggcaacatgagcatcatgttccccatgatcaccagcctgcgggagctgcaggacgccaaggctgttctggaagagtgccgtgccgagctgaccgccgagggcgtgaagatggggcagaacattgaagtgggcaccatgatcgagacccccgccgccgtgttcatcgcggacgagctggccgccgagtgcgacttcttctccatcggcaccaacgacctgacccagtacacctgtgcactggaccgccagaacgcaaagctggagcccttcttcaacccccatcaccccgccgtgctgcgcgccatcaagatgaccattgaagccggtcaccgccacggcatctgggtgggcatctgcggcgagctgggtgccgacaccgccttgaccgagaccttcctgcgcatgggcgtggacgagctgtccatgaacgccaagagcatcctgccggtgcgcaagatcatccgcagcgtagacctgagcaagccctctgagaaggcttgacccgcggaaaaaatattattataatttgtggctcagaaacgcctgcgggcgtttctgagccactttttttcacagaaggggtaactcccggacaggcaaaccttgccgccacacaaaaaagctccccctttcgggggagctggcacgccgtaaggcgtgactgagagggttcgcgcggtgcgcattcccaatcatttccgctgttccagcatggtctggaggcgggtcttggcgcggtaataggtcacccgcgcccatgcggcattgtgaccaaaaatagccccgatgcggtcaaagggcagctcgccaaacactcgcaggctgaagacctccttgtatggctcttccagcgcgtgcagacactggtgcaccgtaaaagcggcatccttatccaccagcagctgcgcgatatccgggctgtcggcggcttttgtttcggcatcttccagcggggcggcgtgctttgcgcggcggcagtggtcgtagtaggcgttgcgcgccaccgtaaacagccacgcccgcacatcctgcttgccgtcatagtttttcaggccgtccagtgcccggaaaaaggtctcctgcgtcagttcctcggccagcgtctcgctgcgggtaagcccctgcaaaaacaggcagacgtcccggaagtagagccggtagatggtttcaatgtccataggcatcactccggccattcgacctcatcccatgccgcaggctcgctgcccactgcataccatgtaccgtcctgaccgttgaacgccaccgtcatgtccgctgcatccaccaccgccgagtggtcagtgcgcatccatccggtgctgcggagcaggtctgtgtcctttttcagcactttatcaagggcatcgtgcacccacgggatgcggtagcggatggcctcgtagtgccagtcggcatgggtcggcttcaggtatacgtcctcggcgcgggtctccagcacccaaccgtttgcaccgttttccgcctgctgatagtaagcctgcaatcgtgcatcaaaaaaggatacccggtcgcaggcggtgtatccgtaccagccaaagccgcacaccgccgccagcgccagcgctgccgcaaagctgcacagcatggtgcgcagacggcggcggttcaggctgctgcggatgtttttcagcggtgcatccggctggggttccggctgcaccggcaccggcttttccatctgttccagctctgcacggcaggcggggcacgctgcaaggtgctgctccaccagcgcactgctggcggggctggcaagcttttcggcgtacaggggcagtaaatcgcggatcacgtcacattccagtttcatggtcatttcctcctttgcgggctttcgtgtgccctttcaccccaataacgcacaaagaggaaaaacgttacaagatttttcagttttccttccagaacagcccgccggaggtctggaacagcaggcgcgggttcacgctcctgctgcccagcttgaagtccatggtcagctcttcgcccagtgcgcccacagcctgccccttttccacggtctggcccttgctgaccgaaagctcctgcaagccgtacagatagctgcgcagcccacagccgtggtcgatgaccaccgtgttgccggtaagttccagattgcccgcaaacaccaccgtgccgttggctgcggcgcggcagggcgcaccggggatggtgtacagctttgtggagttggagcgactgccctgctgaccgttcgttactttaatttgcccgtagtccaccaaggtcatggagtcctcagccgggggcacaaagccgccctgccactgcttggcggtggcggcagcctcgtacagcggccagatggcactgcggaactgtgcgttggcgctgtccgcagcgggctcctcggcctctgcctccaccgtgccgaagtccttcggcagcacggtcagggtgcgggtgatggtctcgccgttcaccgtaatgtgtatctcgtgcccgccggaggaggcgttataggctgccgggatataggcacgccagccttcggcggcgcgcacacactgcacgctgccaaggtcggtctcgatagtgggcacggcgtccccggtcataccggagatgcgcacgcccacggtgccgccctgctccacccgctcggcggaaagctccacctccgcgctggcctgcagggtgaaccggaagctgtaccggtaccagccggtgggctttgcggggcgctccagccccagatttttgcgcagctggccggtgctgccgccctcgaactgggtgatgaccccgcccttgggcacgcgccacgcggtcagttccgccttatactcgccgttcgcagggaagaggaagttctggtactcccccgcgctgcccgcaaacagcacatcccccgccgcattctggatggtcagggcggtgtagcaggtccagtccggcaaagaaagttccgggtgggcggtgtacagcacccccagcttctgcacggtcagggtggcggggctggcgaacaccttatccagctgaccgcccagcagcggcacctgccagcaggagccgttggcttccagcgcctgcccgccgaactgcgccgcaccgtccgggcagccgccctcggtggtaaaggcatagcttacccccatcacagccgccagcagcaccaccacgcccagcgccacactgatgatccagagcaaaaaacgcttcatgttccttctccttatgtacaaaaagggcgcaccggggcaagtccgttcagacagactgctccgtgcgccccgatgtgcttatcttcccggtagtttccggtatttcaggatcattctgcctcggtctcgtcctcggcagcagcttcctccggctctacggtttctgcgtcatcctcgccgaacagcaggcgctcgtattcgtccagttccttctcgcggcggttcaggtaaagtgccacagcagccagcgcaccagccacagcagccagaacagcgatcacagcgaccaagcaagattttttcatagattcagtacactcctttttgcagttgaaacgttgtttcagcttgatttttccagcgggcgtcccgcaaaaggatcttgatgcaagcggcaatcagcgccgctttgtagcttttattatacccgttcccgcccaaaattacaaccgttgcaccccaattttcacgccccgaaggtgctgcggggcacagtttgggcagtgtgccggttttggcgcggttcattacagcaaattgccaaaatcacagcagcagcggcttatacgcccggaacgccccaggcagggtgtaggtggtgcgcagctgctcccggcttgcccagacatagcccgccggggcgctctgcgccggaacgcgcagctgtaccccggacatgagccactcgatgtgggtaaagatgtgctttgcggcgggcagggcggcgggctgcgccgcgccggtgtccagtcccagtgccgtaagccgcgccagcacctcggcctgcaaaagatgctcgccctcccacaagaccggctgccacagcccggccagcaggcctttttccggccgctgctgcaccagaaagcccgccgggctttccaccagtgccagcgttaccggcacaatcttgcggggctttggctttgccttttggggcagctgggcggtggtgcccgccgcccgggcaaggcagacttctgccagcgggcactgcccgcacaaaggtgcgccattgggcacgcagaccagcgcgcccagctccatcagcgcctgattgtaatccccggccttttccggcggctgatgctccatgacccgggcggtaaaggccttttttaccgtcggttctgtaataactccggggtcattatacaggcgggaaaacacccgcagcacattgccgtccacggcgggcacgggaaggccgaagctgatggacgcaatggccccggcggtgtactccccgatgcccggcagcgcccgcagggcggcgtaatcggcaggcagctgcccgccgtactgtgcacagacgagctttgcggccttttgcaggttgcgcacccggctgtaatagcccagcccctcccatagcttatgcagcttttcctccccgcaggcggcaagcgcggggatatccggcagctcctccagaaagcggtagtaatacggcagcaccgccgacacccgggtctgctgcagcatcacctcgctgagccacacatggtagggggtggggtcctcccggaagggcagactgcggcggttcttgtaaaaccactccaagagggcaggcgaaatattttccacttgttttgtgctccttgttgaaaagataggcagaacgccctctcaggcgctcccgtccaaccaaaaacgggccgctgcggaatgcagcagcccggtaaaagtatgcgcgcttctcagaagccgtatgcggtgcgggggaagggcagcacgtcacggatgttctggatgccggtgaggtacatgatcatacgctcaaagcccaagccgtagcctgcgtgctccacgccgccgaacttgcgcagattcaggtaccactcgtagttggtcttgtccatgcccagctcgtccatgcgtgccaccagcttgccgtagtcctcttcacgctggctgccgccgatcagctcgccgatgccgggcaccagcatatctgctgcggccacggtcttgccgtcggcgttctgcttcatgtagaagctcttgatctccttggggtagtcggtgacgaacaccggctttttgtacaccacctcggtcaggtagcgctcgtgctcggtctggatatccacgccccactccacggggtactggaacttcttgttgttctttttcaggatctcaatggcctcggtgtagctgatgcgggcgaactcgctgtttgccaccagctccagacgctcgacaaggcccttgtcgatgaactggttgaagaaggccatctcatccgggcagttgtccagcacatagcggatgacgtacttgatcatggcctcggcgttgtccatgtagccgttcaggtcgcagaaggccatctccggctcgatcatccagaactccgcagcgtggcgggtggtaaagctcttctcggcgcggaaggtggggccaaaggtgtacaccttgccaaaggccatagccatggcctcggcttccagctggccggaaacggtcaggttgaccggcttttcaaagaagtccttgctgtaatccacagcgccgtcctcggtcttgggcagattgtccagatccagcgtggtcacgcggaacatctcgccggcaccctcgcagtcggaggcggtgatcagcggagagtgggcgtagacaaagccgttctcctggaagaacttgtggatggcgtaggcagccacgctgcgcacgcggaaagcggcgttgaaggtgttggtgcgggggcgcagggtgggcatggtgcgcagatactccatgctcatcttctttttctgcagggggtattcgtcggcggggcagtcgcccaggatctccacgctctcggcgttcagctcaaagggctgctttgcctgcggggtgagcaccagcttgcccttgatgcgcaggctgctgtacagaccggtgtggatgacttcatcgtagtttgccagcttaccggcttccagcacgacctgcagggtcttgaagcagccgccgtccgacagggcgatgaagccgatgttcttggagtcgcggatgttctttgcccagccgcagacggtgatctcggtgccgtccgccggggtgctcttgaacagcgaaaggatctcggtacgttccatagtagttctcctttataaacaaaaaagacagcttttgccctgaaagttcagggcgaacaagctgtcttgtaatgtccgcggtgccacctgaattaccggaagtgtccggtcgctcacgcgctctttgtttaagcgctgtccctgtaacgctggacctgcggcgcacctacttaacggcagacacactgccgtgttcagtttgctgctcccgggtgttcgttcacgcggcgcacgggcgcggctctcagctgtgccgcactctctgggccggacggcccgcgctacttttcccgttccttgcatttgttgttttaaaatagcacgttggcggcattttgtcaaccttaccgcgcggcatcggggaaaattctgtgttttttcttgtcaggatgcgcattctctggtaaaatggaaaaaagcggtattccgcaaaaacagattctggaggagatcatgaagcacacacaccgcatcatccgtctgctgaccctcgctgtggtcagctgcgcactggccgccctgctgagcggctgcaccaaagaagaattcattgccggttacaacgagtttttgttcggcgactggttcccctctcccccaagcgccggggagaccaccgctgcggaaggttccgcatcgggggactccggtcacgtctacgccgagcccaaccccgagtgcgacgccaagatctcgtcgctgatgagcgagctgtactcgctggagtcctctgcacggtcggatgtcagcagtgccatccagagcgcaaaggatgaataccacgctctgcccgcctctcagcggacctttgccaataaagtcagcatcgcctacaagcatctttcctcggtggaaagcacctacgacagtgccgtctcctcggtggtcagcgagatgcgcagcgtgctgcgggagtataaccagcccgagaccatagccgatcaggcctggagctactatcagtctgccaagagcagcatgatctccagccttggcggctgattcagggcaataccgcataattctaagtgccgatacggcgagtgaggtgcggcagatgctaagccaaaagcacagataatactttgtgtattatcgagcattttggcaacgcagatgccgtgccgcagccgccggagtggtgcttaagccgtaaggcgggaattgtgcggtgttgcctcagcctaataatgtttccacgaggccctgtgctgccagatatccggcgtacagggcctcatttaagttgttgccatgcccgccgatctcgatcagcagactgccggtggtcaggtcctgattatagaaccggtagctgaacagtaccgggcgggtaaggccggggtattttgcctccatgctgcgctcccacgcagcggcaaaacgcaggttctgccgccatgcgggcagctgcacactggtgccgttgtcgcacccacagatgatcatcacctgcgccgcctgccgtccgtctatggtacacaccggggcgcagcgggtgccgttttcccgctcgatggcgtcccggtggacgtccagcaccaccttgatgctggggtactgcgccagatactgctgcaccaccgcccggctgttggcgtaactgccggtgtagctggggtagtcgttcagggtctcgtcgtgcagggtgcagatgcccgccgcgttgagcgtatcggccatcacccgccccaccgcgcacatattgatgctgcggtcggtgctgcgggcaccgtccccgggggtgaaccacagcccggcagaaaggcggtagtcctcggtggcgtgggtgtgcatgatgagcacctgcggcgcggcgctgtccttttcaatggcaaagggcaggggctgcgccgcctcggcggcgatgtctgccgccgtctgccgggtgttattcttgatgctgcccgcaccgcaagggatgtacttttcgccgctgccctgcccgaactgctgctctgtcaccgcgcctgcatcggcagggcgggcttcgtccggctgcaaggccacaaaatactgctccaccccggtctgcaccggggcggcggcctcctgcgccggagaaggtgcggatgcagcctccgccgcgctttccgcagacgattctgctacccggctctccacggcctgctgccccagatgcagcagggtctgcgcagcaggcaccggcgctgccagaaaggccgccagcaccagcgcggcgctgcgggcaaagatgcacagggctgcaaacagcaccgcagcctgcaaaaagggcactgccctgctctgccccgcaggcagacgccaaggctctctgctgcgcatggcaagacctcctttcttcaccccgtcagccagcagagctgctgcacggtaaggcggggctgcaaagcgcggttgacgctacccgccagcagggccgcgccgtgggcgatgacgctgtccagcgcccggggcgtgaccacaaggtctgcgccctcctgcgcctgcatcagggtggggatgcccgccgccaccaccggcacgcctaaggtgtcccgggtcaggtggcgggtgtggtctgcctgcgccgggtaaagccctgcgtccgaaaactgcaccgtgcgccccagccgctgcccctcggcggagcaaagactgtccacgcagaccaccgccgccgggcgcagctgccccaccagcgccgccgccagctgctgcagggaaagcccggtggctgccgccaccccgggcgcaacggctgccaccgggcgcagcccccgcaccggcggggcagcgcccgcgcccatggtgacaagaatgcgctgcaccgtgcgcgggccaagggcatcggcggtaatgcggcggttgcccacccccagcaccagcaccggcccttccggcggcaaaagggcccgcagctcccgggcgcacacctcgatgacggcggcgtcccgctcgtccagcacgctgacgctgggcatttccagcgtgacatacctgccccgagggcggctgagcccttcgcgggcaatttctacccgggtcaccgtgaccccgccgtggcgggcggtggccagccgcacccctgcgggcagcggttgcgccgctgctgaaaacagctcgtcagccatatccgtagtacgcattttccacactctccgttcctttttggggcaaaagcccgctttcttgccggaaagtatgggaaaaataaaacttttccaaacaaaaatcaaaaaaacgcttgcgctggtacgcgaaatatggtatcatagggtgcgctgttataggtagccaaggaggtggaacgaatgcctaacatcaaatctcagaaggaccgcgtcgtgcaggctgctgcagagcaggctcacaacaaggccattaagaccaacctgaaaacagtcgtcaagaaggcagacgctgccatcgatgcgaatgccgctgacaaggacgcaaccgtcctggctgctgtttccgcgatcgacaaggctcgcgctaagggtgtcatcaagaagaacaccgccagccgcaagatcagccgtatggcaaagcgtgctaacaagaacgcttgatcgcgcagtttgattgacgaacaaaacctctgtaccgggtaaccggcacaggggtttttgttttttctgccgttatgtcccgcacagcgcggcaaggctttgccgctgcaccggttccagcagctgctccggcggcaacggctgcggcggcaccaccacccaccacaccgcccacgctgcgggaaccaccgccgccagcgaaagtcccgggtacaaaagcgccggctcgtgcagccacgggctgcccggcggcagcaccagcgccgtgcacaggcacagtgccgcccacagctcccacaatacggtctgtccgctgtgtttcatgcgcctcacctccgttttgcccccagtttaccagccgccgggcgcaaaatgtggcgaagcagcgcggacaaaacatcagttctggtcgtggcttttgcccacaaggctgcataccacgccgcagacaaggcttgcggtgatgcccgcagaagcagcggtcagcccgccggtcaggatgccgatggcacccttttccgccacggcggtgcgcaccccctttgccagcagatgcccgaagcccagcaggggcacgctcgcccccgcaccggcaaactctgccagcggcgcatacagccccaccgccgagagtaccactcccgccaccacatagccggtgaggatgcgtgccggggtcagctttgtcaggtcgatgaacagctgccccaccgcgcagatggcgccgcctattaaaaatgcccacagatagttcatttcagctctccttttccggcgcggtcagctctaccaagtgcgccaccgccgggatactctccttctgcaaaaaagtggtctggctcatcagcgccccggtggcgataaacagcacccggcggctgccgcggcgcagcagctttggcaggatatgcgcgcagagcacggcggcgcagcagcccgcgcccgagccgccgcttttcacccgctgctccccggcatcgtagagcagacagccgcagtccgcgtggtttttcagcagcagaccctctgctgccaacagctcccgcagcatctgactgcccaccagcccaaggtcgccggtgtagatgcagtcaaaatcccgcagttctgcatgggtatcggcaagatagtgcagcagggtggcagctgctgccggtgccatggctgcgcccatattgttgatatccttgatgttataatcctgcacccgcccaagggtggcggcggcaacgcccaccccctgccctgccggacgcagcaggcagcacccggcggcggtggccgtccactgcgcggtaggagtgcgcaccgcgccgtagctcagcggggtgcggaactgacgctctgccgcacagaaatggctggaggtcatggccagcaggttctgcgccgccccgctgctgcacagcgccgcgcccagcgccagcgcctcggccatggtgctgcacgccccgaacagccccgcaaagggcacgcccagctcccgcagcgcgtagccggaggcggtgcactgcgcctgcaagtcccccgccagcgcaaggtctacccgctcggcgggcagagacgccttttgcaggcagagccgtgccgcccgcagctgcagctgcttttcggcggcttcccagctgcactgtcccagccggttgtcggtggtcaactcgtcaaagcccgccgccagcgggccctcgctctcttttttgccgcccaccgccgcctgtgcggcgatgaccggcggggtatggaacaacagggtatcgccccggcgctctgtcataaaattttctccttttttctacaaaaaatgccccggcacgtgctatactggtgctgcggcgctgcaatatccggcggggctgttccgtattataggatagaagcccccagcagccagagcaccgcgccgtacaccaccgccgccagcgtgccgtacacgatgaccggcccggcgatgaggaacatcttggctcccgtgcccggcacccgtccctcggccttgaactcgatggccgcgctgaccaccgcgttggcaaagccggtgatgggcaccagcgaccccgccccggcctttgccgccagcttctggtaccaacccagcgtagtcagcaccgccgagagcaagatcaaagtgcagctggtcagggtgcccgctgtttcggcgtccgcgccctgccgcagaaacagctgccgcagcccttcgcccagcaggcagatgctgccgcctacacagaacgcccacaggcagtctgccagaagcggcgaatgcggccccgccttctgcacccggcgtgcgtattcctgcgctgtcatcttcatcttcccgcgcccccttttgcggatagtctgcccggggcggcgggtgcttatcctttttttgtgaaagaaggtaggttccatgcgttcttcccatcaccgcaaccatcgcgcccgccgtctgctctgcctgacggcgctggcctgctttgtggtaggcggcaccgcctacgcctgcacccgcaaagctgcggtgccgcagctgccggagttgcccgccgagagccttgcgcagcccgccgagaacggcgcgcagcagagcgtccttaccgccgcacaggcgcaggcgctgctggacgacccccgcatgatccttgtgagccgcacccacccgataacggaggactatcctgtcgagaccaaggaatgcggctcggccaccgccatcaacaagactttgcagaccgaagccgccgaggcttttctttccatgcaggccgctgccgccaaggacggcgtggatgtgcggatgcagagcggctaccgcagcgtcagctaccagaaaaagctgtacgataacaagacccagtactaccgtgataagggtctgagcgaagccgccgcccgggaaaaggcggctgccatcgtcaacccgccgggctgctctgagcacaactgcggccttgccgccgacctgaacagcccggagcacaccacccttgacaccggctttgccgacaccgccgccttccgctggctgtgcgagaacgcggagcagtacggctttatcctgcgctaccccaaggaggcggaaagcgtgaccggcatcacctacgagccgtggcactggcgctatgtgggcgcggaaaacgccgccctgctcaaccggagcggcctgtgtctggaggacgcggtagccgttttgcagcgcattgccgccggggagaccgtgaccggttaaaatccgatgaaaactgccggaaaaccctgtggggtgcgttgcaatttacctgctgttatggtaagataaatacagtctgcccgtgtgcgcggcgcagccccgcaccccgacaaacgaattcaacaaaagaaggaatattttatgataaaccgcacaaaactctctgtgatcgccgtcagcgccgtgctggctgttgccctgaccggctgcggcggcagcgcttcttccgcgccgtcctccgtgtccagcgcctccgcctctgcaccggtctccgatgcagcttctccggcggcggataccaccgaaaacggcactgccgatctggacagcgctgtggagaccctgctggctgcgaaccccatctccaatcagttcgagatcgccgccatgaacatcgagtacgacttcggcctgaaggcggaggacgtagccgcctacaagggcgtgaagagcaacgacaacggcgatgccggccttgtgctggtggtggaagccgcttccggcaaggcacaggacgtggtgaccgcgctggaaagctacaagcaggatcaggtggctttctacggcaactacgccgagtttgcacaggcacagagcaacgtggaaaacgccatcatctcctccaagggtgaccgtgtggtcatggtgatcgcctccaacgagtgcaccgcagacctgaacagtgctgtggacagcgccctgaacagctgaatctgaccttccgagccggtgccatctgcggcatcggcttttttcagtagaaagccctctccgttagaaccctctcagtcaacgcctgtcggcgttgccagctcccccgaaggggggagctttgacatcacaacacaaaggaggctgaccccttggttttcagcaccatcatcttcctgttccgctttttgcccatcacgctggcgctgtactatcttgcccccgcaaaactgaagaacaccgtgctgtttttgtgcagtctggtgttctactgctggggcgaggtgcgctttttcccggtcatggtggcgcttatcctcatcaactatctcagcggccttgccatcgagcactttgatgcaaagcccgcgctgcgccgcttttttctgctggtagcgctcattggcagcttagggatgctgttctacttcaagtacgcaaactttgtgctgcgcagcgccaacgccctgctgggcaccgcctttgccgaaattcagggcatcggcaccctgccgctgggcatcagcttctacaccttccagaccctttcctactccatcgacgtctaccgccgggatgtaaaagccgagcgcaacatcatcgatttcggcgcttatgtggtcatgttcccgcagctcatcgcggggcctatcgtcaagtaccgggacgtctccgaccagctgcacgtctacaagcaccgctataatttaaagcagatcgaagagggcatgaccctgttcaccttcggtcttgccaaaaaggtgctgctggcggacgctgtgggcgcgctgtggacggacattatcggggtggcagacagcccctccaccacctttgtgggtctggcaaacgcctccaccccgctggtgtggctgggcatcatcgcatacagcttacagctgtacttcgatttctccggctactccctcatgggcatcggcatgggcaagatgctgggcttcgacttccccgcaaacttcaactatccctatatctccgcctccatcaccgagttctggcgacgctggcacatgaccctgtccggctggttccgggagtatgtgtatatcccgctgggcggcaaccgcaaggggctcaagcggcagattttgaacctgttcatcgtggagctgctcaccggcatctggcacggcgcgaactggaactttatctgctggggtctttactactttgtgctgctggcagctgaaaagctgttcttgctgccctacctgaaaaagggtaaggtgtggccgcatttctacaccctgttcctcgtggtggtaggctgggcaatgttcgtgggcaacgacaccggcgtgtccttcgggctgctgttccagaagctctttatcccctccggcggggtgtcgccgctgtatttcctgcggaattacggcgtgctgctggcggtaagcgtggtgtgctgcaccccgctgatcgaaaagctgtgggatgtgctgcgcaagaacgtggtcacccgctgcgccgccatcctgacgctgttggtggtctccaccgcctatgtggtgggcagcaccaacagcccgttcctgtactttaacttttaaggaggcgggaagatgtccaaacacgaaaaaaagacctcctcccttttgcactacccggtgctggtggtgttcagcctatttttcatcgggctgttcgcgctggatatggtcaccccggatcgcagttacagcgagctggagaacaccaccctgagccagcgcccggcgctgacccagttcaccgccaaggggctgaacagctactttaccgcctacaccaaatacgtcaaggatcaggtggcagggcgcgaccagtggatcagcctgcagagcgtggtggagaccaccctgctgcaaaagcagcagaacggcggcatcctgctgggcaaggagcacatgatgttcccccgcacctacgggctgctttccagcgaggagcgcaccctgcccaaaaacaccgcagcgctcaccagcctgtgccagcgctacccgggcaaggtgaatgtactggtggcacccgctgccagcgatatctataaagagaacgtgcccgcaaacgcccctctgctggacgaggacggctaccttgaccagctttccgctgcggtgcaggcggccggcggcagctttgtggacgtgcgtcccacccttaccgcccacaagagcgagtatatttattaccgcaccgaccaccactggacgagccttggcgcctactacgcttacagccagctgtgccagacccttggccttaccccctttgataccgccgcccacactgcgctgactgccgacggcttttacggcacccactacgccaaggcgcgcacatggaacgccgtgccggacgtgatcacctactacgaccttgccaacaccctgacggtatggaacgtgacggcggcaggccagcccgccgaggggcagaccaccggcctgtacgacacggagaagctctccgtttatgataaatacgccatgttcctgcacggcaacaacggtttaagccgggtgcagggcaacggcagcgggcgcatccttgtcatcaaggacagctacgccaactgctttgtaccctacctgaccgccaactacgccgacattgacgtggtggatttccgcaactacaactacggcttggacaagctgatcgccgataacggctacgaccagatccttgtgctgtacaactttgacagcttcaagagcgacccctacctctaccgcgccggagtacaggggtaaacagtcaaaagcctaaattattgcagtctattttcacaaatttatagccgcaatttcatgcgtcccgccagtttttgcacagatgtgccaaaaccccttgataaaatccgaccactgttgtagaatggccatatagagaacaatgctctatcagcctttgggtatagacgccgggggatcgggatgcaatgcggcatttccctttgacaaaggagtattgaagatgaaaaagatgaattatcccgcagattatgcggtactttccaacgaagaaatgacctataccaccggcggcggcgcagtggatgatgctgccagtctcgccactactgccgcaacggtcgtaggtgctgtggtgctggcctccagctacatctggggcatcaagcaggcacgcacatggctgcagcaggacggcaacaaggacggcaacttctttaccgtgatgggccgcgccaccgatgcccttgccgccgatatgggcaaatccgccggcaactttgtgcgggatgccgtttccaccaccatggtggtggcactggctcccctgagcgccattctgctggtcgtgcgctgagaccctttattcagaaaaagcggtgcgtttttgggtgcaccgttttggatagctttgtttcaaaaggagtgttattatggaaaaaatgatgatgcccgcgtattacaacgtcctgtccactgaggaaatgacctacaccgaaggcggcgctactgctaccatgtctgaggctctgctgtgctggctgattcctccgtacggctggttcaaaggcgtgaccgctgtccgcgactaccgccgtaagaaccccaacacttggatggagaagggtctggatgctctggctactgatatggagaagagcactgccaacaccatccgcgacctcgcctgcgctgcatggttcgtcacttcaaccgcttctggtgtcggtctgatcatcaatgcagcagtcatcctgctctgatccatcttatctcataagacgactcggagtacaccaaagaacaaagcaggcggaggcgctgcccgaaagggcagcgcctccgctgtttttattctctttgtactatcttcccttcgcttttcccctccaattctccaaaaaaatgctttatctattgttctatttgccaatggtctctctttacccagtgtgctatacttactactaggatattgttcatattttcgttggaggtttacttatgaaaaaaagatttgtagcagttcttctcaccgcactattcagtgtgctgctcctgactggttgcggcggcagcgattccttcatgaccgatgctgagtttaccagaatgatcaaccgtgaactcgcagacagtggaaattccattcagttgacctatgattccagtctgggtgcaaaagcaaaaacagtatttaacgtttatatcgcaaccaacgatgttgaggccgctttaaaagcagccggactggatgacgaccattattatatgattgctgccgactacccgtttgaaagcttttcaaagtctgcaacttatatttcttctcaggttttgtactatctggtaaacggtcaggtcggaaagcgagtcggctatgccactataacctttaaaaacggaaacacccaaattattgcacttgttgccacttattaaaaagctctatcaaaaccaacgcggaggcgctgcccgaaagggcagcgcctccgctgtttttatgctcattcttccggcaaaggttcttctttcaaaggttcgtcacttgttcttgcacggaaatgcgccctcatttcttcattggtcagacagcccctctcttccccggagcggcgaccttttgcgatctcacccatcagacggatcgttgcctgtgctttctcctgttcgtatgctacgcgggtcgcttcctcctccacaaaggctctgacctccggcgttgccgtagaccatgtaacattgaaacggcgacaaatctgataaaacgtgcgataaaacgcctcccgttccgggtcacgctggaaatactcttttgcatccatcgaaaacacctcacttcaaatcgattatactcgattctgtgtagcttttcaacaaaaacaaaaatcccctgaactgctgtttccggcagctcaggggatttcataccttatgcgttgaacatatccttcagctttttaaagaagcccttgcgcttttcgtagttttcttctttcagcgtgccctcaaattttttcagggcatcgcgctgcgccttgttcagctttttggggatctccacctcgcacttgacgtacatatcgccgcggccgcggccgttcaggtactggatgcccttgccgcgcaggcggaaggtggtgccgctctgggtgccctcgggcacggtgtactccaccttgccgtcaatggagggcacggtgacgttgtcgcccagcactgcctgactgtaggtgatgggcacggtgacccacacatcgtagccgtcgcgctggaacacctcgctggggcgcacgctgaccatgacgatgacgtcaccggcggggccgccgttggtaccggcatcgcccatgccgcgcagtgcaaagctctggtcgtcgtcgatgcccatggggatggacacctccagcgtctttttggtagccaccttgccgctgccgtggcagaccttgcaggggttctttaccagcttgcccttgccgccgcagcgggagcagggctgctgggtctgcatcacgccaaagggggtgcgctgctggcggatgacaaagccgcgtccgccgcagtccgggcaggtctcggggctggtaccggcggcacagccggagccgtggcactcagtacactcctgctgacgggtgatggtaatgttcttcttgcagccgtgcacggcctcgtcaaaactcagggtgatgcgcacccggatgtcctgacccttgcggggggcgttggggtttgcctgacgggacgagccgccgaagccgccaaagccgccgccgaagatatcgccaaaaatgtcgcccagatccacgccgtcgccgccaaaaccgctgaaaccgccggggccgccgccgttctgtgctgcataagtggggtcaacaccggcaaagccgtactggtcgtacagctggcgcttcttcgggtccgaaagcacctcgtttgcctcgttgatctccttgaactttgcctcggcgtccttatcgccggggttatagtccgggtggtacttcatggcaagcttgcggtatgcctttttgatctcggcatcgcttgcgcccttggatacccccagcacttcgtaataatcacgcttttcctgtgccatatccactcacctctccaacctctcccgtcacggtctgtctccgccgaaaccctctcaggcgctgacgcgccagctcccccgaggggggagcttagaccgagaagggaaacttgtcctcaccgccaaaagctcgcccatcgggagagctggcattgcgaagcaatgactgagagggtttacattctataaaccagcaagagccgccccggcctaaaccggagcggcttttgctctattgcgcgtatgcccgccggtttggccggacacagcgctttgtgtcaaacttagacttccttgaagtcggcatccacaacgccgtcatcgttgggcttttcgttggttgcgcctgcgtcagcaccgggctgtgcaccggcggcctgctgtgcggcagcggctgcctgatacatcttctcgaacacctggctcagggcttcctgctttgccttgatgtcgtccacgttgccggactggacagcggtcttcaggtcagcaagctttgcctcggcatcgctcttcacgtctgcgggcagcttgtcgccgttctccttcagcatcttctcggtctggaacaccatctggtcggcaccgttgcggatatcgacctcttcacgcttcttcttatcgtcggcagcaaactgctcagcttccttcacagccttgtcgatgtcctccttggacatattggtggaagcggtgatggtgatgttctgctccttgccggtgcccagatccttagcgctgaccttcacaatgccgttggcatcgatatcgaaggtaacttcgatctgaggcacgccacggggagccggagcaatgccgtccagatggaacacacccagactcttgttgtcgcgggcaaactcacgctcgccctgcagcacgttgacctcaacagagggctggttgtcggctgcggtggagaacacctggctcttgtgggtggggatggtggtgttgcggtcgatgatcttggtgcacacgccgcccagagtctcaatgccgaggctcagcggggtgacatccagcagcagcagacccttcttctcgccgttcagaacgccgccctgaatagcagcaccgacagccacgcactcatcggggttgatgcccttgaagggctcgcagttcagttccttcttcacggcgtcgtagacagcggggatacgggtggaaccaccgaccatcaggaccttcttcaggtcggaagcgcgcagacctgcatcctgcagagccttgcgcacgggggtcatggtgcgatcgaccagatcagcggtcagctcgttgaactttgcgcgggtcagggtcatatccaaatgcttggggccggtagcatcggcagtgatgaagggcaggttgatctggctgctcattgcgctggacagctcgatcttagccttctcggcagcttccttcaagcgctgtgcagccatcttgtccttgcgcaggtcgatgccgttctcggtctggaaggcgtctgccatccagtcgatgatgcgctggtcgaagtcatcgccgcccagatgggtatcgccgttggtggccagaacctcggtaacgccatcgcccatctcgatgatggacacatcgaaggtgccgccgcccaggtcgtagaccatgatcttctggtcatcttccttatccacaccgtaagccagagcagctgcggtgggctcgttgatgatacggcggacgttcaggccggcaatggtgcctgcgtccttggttgcctgacgctggctgtcgttgaagtaggcaggcacagtgatgacagcctcggtgacggtctcgcccagataagcctcggcatcagccttcagcttctgcaggatcatagcgctgacctgctggggagtgtactccttgccgttcagggtcaccttatggtcggtgcccatctgacgcttgatggaagaaacggtgttgtcggggttggtgatagcctgacgctttgcaacctgacctaccagacggtcgccggtcttggtgaagccgacaacggacggggtggtgcgggcaccctcagagttggcgatgacaacgggctcgccgccctccataacagctacgcagctgttggtagtaccaaggtcgataccaataatcttactcataatgaaatctcctctcgaaagaacaaatcttgtttatatgatgcttatgatgatgtcaagcggatgttattgcaaactcccttgcgggaggttcggcttgtttattcggccaccacaacggttgcatggcggatgatcttgtcacccagcttgtaacccttctggaaaacggtgaccaccgtgccgctctcctgcccgtccggggcggggatctgctgcacagcattcataaggttggggtcaaagggcttgcccagcacctcgatctcctccacatggagggcgtccagtgcctttgccgccttatccagcgtcatgaccacgcccttcttgtagttctcatcggtggtgggggcgttggcagccatatccagcgtatccagaatggggatgatcttttccactgcatgggaaacaccgtcgccaaacttctggtcggcctcgcgggtggagcgcttgcggtagttgtcgtactcggcagccatgcgcagcagctgatccttggcctgtgcagcgttcttttccgctgcatccagctttgccttaacggcttccagctcccgggccttcttgttgaaccagccgccgtccttcttcttgtcctcttcggtggcagcttcggcagcagcctgttcgggcgctgcagcagcggtcttttcctcgggggcagtctccggctgctcggtctcgggcaccgtgttctttgcttcttcgctcattccagatcctccttatagatcacagtccgccgtggtacggcagcctgcggggtgtcttttcgtttgccgctcatgccctcgcccagctggtctgcaaactcgtgcagcaggggcatcagcttctggaagggcatccgggtggggccgatcagggcaatggagccccacagcccgccgcctaccaggtaccggtcgctcacgatgcacagcccggggatctgcggttccagatcctcgcccagcagcacgctttcgctgcggttttccgggggtgcgatcaggcttgcggcctgttcctcgtcgttcagcagggtaaggatatcacccacccggccgtccagctgcggccagtccagcaggtactgctcgccgcccagaaatacatggggctttacgctgtcctgcaaaattgcggctgcggcgctgaccaccggcacaagttccggtgcgatctggccgcacagctcgctgagcatccgggtggaaagatccaccggcgccacaaaggtaaggttgcggttgagcagcgccgcaagggcagctgcattttcccgggaaagcccggtgcgcacccgcgccacccgggtgcggacgtaaccggcagtggtcacagccagcacagcggctgcgctgcggcccacctgcaccacctcgtaatgggcgatgcacagatcctcggcgcagggggtgctgacggcggcggtgcagccgctgatggcggccagcgccttggcagcgccctgtgccagcttttccggctcgtggtcaaggctggcgaacaccgcatccacccgggcgcgggtaacgcggtccagcggctgatcatcggtcagcaggttgtccagataataccggtagcccttggcgctgggcacacgccctgcgctggtgtggggctgctccagcagacccagctttgtcagcgccgccatctcgttgcgcagcgttgcgctggacactgccatatcaaagtagtttgccagcacgctgctgcccaccggctcgccctcaaggccatacagcgccacgattgcctgcaagacccgttgcttgcgtgcatccatcgtcatagcgcctgcctcctttttgtatcgcttttatttgtttagcactccttgttcctgagtgctaagaccattataaccgtttttgtcctgctgtcaagccctttgcaaaaatgtttataaagattcataattctgtcataaagggggtgtgcgccctaggtggggcggggctgaaccccctcagtcacgcctgacggcgtgccagctcccccgaggggggagcttttggcatggcgggaagctttgcggtttgaccggaaagttcctgcctgctttcagcgtgcagggacgctccgctgggccagaggcagggaggggtgttccgagtcccccctccctacctctggactccacccaccccacaacgggtcaagggctacacgcccttaacaatcctaaagaagaagtcgaagcacaaaaaagctagcgctgcgccagtcggcgctatcgctttaacgcttttttcgctgtgccatgtggtcggccctcctttttgagctttttcctcattataatacgctctgccgttttgttcaatatacggtttcccctctgcccttgctgttgcaactctgcaaccagtaagggcttttttctttttccgttgcagttctgccgctttttcgcctttcctgcaaaattttccgtatattcaggcaggaagcaaaaaacaccagatttcccactttggggatactctggtgcaacacataacaccgccccgcccggtggccgcagggtgcggggttttgtaggcatcgaaccgcttgtccacccctgtccgtaaaaagtgcattttttcacggaagaagttcgtacaacctgtacggtctgtacttgtacgcacccgtacggcaaatcgagataaattaaggcgtgttatcgtttatatttcgggtttccgtacaccgtacgaaccgtacaggttatttgaactccgtacgcgattttttcggatgcgtacggagcaatcaagttcgcattgtgcgaacttgattgtaactctcccgcaggagacgttccccctcggagagcccactacactttgcagaccatagggatgaaagtgtcatagtgggttattacacttccgcagaagtgcatctccgttccccgtcacctctcgatgaaccttgaaaggagggatgccctttggcaagaaatgatggtattgaccgcaccagtgtccgaaatctcgctgtttcggacaaggctgttggcaacacccaacagcacaacgagcgcgaaaaggacagctaccggaaccccgacattatcccccagcgcgctgcatggaatgtccacttcaaaaagccaaccgccagctacaccgacctattcgcccaactggaagccgctggagccatctccacgcgcggcctgaagccggatgccacccactactgcgaactgatttttgatgtcaactcggcctactttgacaaccacggcggctacgagttcgccaagcagttctatgaggatgcctacaaagctgctgtgcaaatcgtgggcggtgagcagtatatcctctcggcggtcatgcacgcggatgaggtcaaccgcgccatgaccgaagcattaggccgggaggtctaccattaccacctccatgtggtctatgtacctgtggtggaaaagcagatcctctggtcgaaacgatgcaaggacaaggcactggtgggcacagtcaaggagaccgtcatgcaggtcagccgaagcaagaagtgggcttccaagcccctgctggacgatgccggaaagcctgtcctgcaaaagagcggcaagccagtcctgaagaagtcgtacagcgtcctgcaggacgatttcttcaactatatgcgcactgccgggtacacggatgtggagcgcggtgagcgtggcagcactgaagaacacctgaccgtcacccagttcaaagtccagcgggagcaggagcgactggacactctgaccgcccaagccgaccagcaagcacagtcgcttgctaaaaccagtcagaccctctccaaaaaggagaaggaacttgccgctgtgcagaaaaaggccacgctcacgaaagaagccctcattcatgcacgcgatctggaatatatcggcaagcgcaccttcctcggcaactattcgctgaccgaagaagaattttccaagtttaaaaagcaggccgaccacggctatatgatggatgtggagaaccgccgcctgaaagaagaactttccaccgccaagaaagaggccgttcgttggagcaacaagtaccacgacctgtggtacgacgtgaaaccctatctggatgctctccaccgtgcgcccgaactggtgcgtggctttctggaaaagattcttgcccccaagcaggagcacaccatgaatgtgccgcagcaaaaccgtaagcgtgggcaagatgtagaactttaagctgaatttttagatgatatgacaatataaggagcaatgcttatggattttgaccgtaattctatgaccgtccctgtgcaatcttccgattatacgaaaaagttcttgcaaaaggactcgaatcccactacaatggaagtggtcactcaaaccaatgccgtcaagtctccgactgacagcccggcaaccacgaaactggtgtacacggtggaagagatcgcacgaatgctggccatcagcctgcgctctgcttacaatctgtgcaacagcactaccgaattccgcgtcctgcgagtaggcggaaacatccgtgtgccgaaggacagcttcgatgcgtggctctaccgggcagcttgataaggaggcaaacagtatggcatatattacgaagcgcggcaactcttacagcgtccgctacacctacgaagatgagcacggcaagagctgcgacaaatgggagagctttcccacaaaagaggaggcaacgaaccgaaaaaagcaaatcgagcatgaactggccgctggcactttcctgatcccgtcctcggtaacggtggcagagttcctgatggactggctgccgaaacagtgtagcaagcacaagtgggcacccaagacctacgaatccaatctttccaccattcagaatctcattatcccctatatcggcagcatggagatgcagaagctcaagccctaccacatggagaacctctacacgactctgagcaaaacgccctgcggttcgtatgtcgagggcaagaagcaggagctgaccgaaaagcagaagcagcggtttctatccggcaccaccatccacgaggtgcatcggctgctgggtacagcgttccagtacgccgtggaatggggcattcttgtcaaaagtcctgttcctgtggacagccccaagaagtccacgcaggagcgcaccatctggacggtggaggaaatgcgagcagctctggatagcatgaaggaccctatcctgcatctggcggtgcacctcactctggtgggcgcactgcgagagggagagatcgtaggtctgaccccggaagatcttgactttgacgcagcagatggtatcggaacgttccgtatcaacaagtccatgcagcgggtgcggaaagaagccctgaatcaggtggacgatggctgcatcatcaaggtattcccggacaagctagaacgcagcaccacttccctcatcctgaaaagtactaagacggcgtcctcctgccgcactatcttcatgacctctgctctgaaagaggaattgaagaaatggctgaatcagctggcggcagacgagatgaaagacccggcacgttaccatgacagtggaatgctgttccgtctgcccaacggtctggcgatcgagcctgtgctcatccgcaagaagtttctgaaatggcaggacgcacacccagagttcccccgtattgtgttccacggtctgcggcattccagtgcaacctatcagctgatgatctccggcggcgatgtaaaggctgttcagggcaccaccggacacgccacggcggatatgctggtgaacacctacgcccatatccagcagtcctctcgtgtagaactgggcagaaagttcgaggaagggttttatgctaaacaggaaggtcccagcccgcaggctgtacccgccgcaggcgaaccaacgatttctatgactgcgttgctggaactgctgaaaaatgcagaccccgaagtaaaggcccagctccgtctggctttgctgacctgatacaaaatttaccacgcattgcaaagcaattccagcctatgcagaggattcccacaaaaaagccaaccgtgcaaaaaccgtgcattgaccgtgcaggccccgaattttcggggttacatagcaaaaaagaacgccaaatcttacgatttgacgttcaatatctggtgcacctccagggactcgaaccctgggcccactgattaagagtcagttgctctaccaactgagctagaggtgcatattatcagaatgcggtttcttcattctgataatcaaaagtcggcgactacctattttcacaagccgtttccagctaactatcttcggcacaagtaagcttaacttctgtgttcgtttccaatggaaaggttttgttatctgacccctatcagtttgatacgatatacagtattcgattgcagtaatcctatttttcattaaaggtcaatcttccagtctgccatggtcgcagccaagtgagaggtaatgttcaagctccccacccagtacaagctgggcgtactccaagggcttattgtagagcagccagtccagttctgcccgctgtgccggggtgctgccgtattcgtcctcaatggcgatgcagtcaatggcaagggtggtgccatcctcaaatcgggcttctacccggttggtgtccatgttaaagcgacaggaaagcagtttcatcatagtaatatcctcctagacttgattttgatgtgcggtcactcaaaccaatgccgtcaagtcggtaggggatagagcgattttgtttgtcagagaataagtgcacggtttctgcacggactttgcacggtttcaaaacgtgcagaaggtgcttttcgctgcaaaatccgacaaagggtgcagaaattgccgggtgaaaaactacgctgctttgctcaaaaataacgatgactcgaaacttccataaatcgagacgaaccggcggcttgctctcttaatcagtgggcccagggttcgagtccctggaggtgcaccagatattgaacgtcaaatcgaaagatttggcgttctttctttatgtaggaaagcggctgcacactttctgcacaccgtttgcacatttgcccgaatcaggggcttttctgcgcaaggtttgcacagcctgctttcctttgcataaaaagtcacttgtcggggcaaggcccctccatcttgctggcgcaagaccgttcggtcactcaaaagccccactggggcttttgttgcttcgcaaacgtgaatcttttatgcaaacagaactctcgtcaattctctgcgttcgtctgcatccatcagccggatggcttcaaggatctccttaccagagatttttgttgccgccggcttttcgttttaccagggctggggtgctgccggggtcaggtcttgggaatagaagtttgcttcgatcttctcggtcaactccaaccggggcttgtcctgcgtgtgggcgtaggtgtccatcaggacggcagcagttgcatgaccggtgttgccctgcaccgatttgaagtcaccgtccgactgcaagagttggtaggtggcactagaatgccgtagaccatggaacacgatctgttcaaactccggatgctccgctctccacaggcgataccactttgtcagcagctccggtgcgatgggcaagccgtccgggagccggaacagctgcccgcagttgctgtacttctctggggcgttctgctcgtcctgtttgagcttttccagccatgccagcagttcttcctttaagggctttgtcatatacaggacacggttggacttcttggtcttgggctttttcaagatgagagaggacttgctgccctcacgcctgtccgggaaggtgtggtagacctgattggggtcgagcttttccaaagcgtccttgttggctcgctgcatggtcttgctgaccgagatggtgccacgcccatcggcggcatcgaaatccagatcactcggctgcaagccgagaatttcgccctcacggagcgaaaggatcatgctcatgtgcaccgccagatgcagggcaggattctcgatggtttgcaaggctgccagcatggttttttcgtcccagatggtgcgctcctcgatgttgaccttgggggcatcacggggcaggggaatcttgtggatgaggtcccactccaccgcataggaaaatgcggtcttgagcagcgtgtggacttcgtgaatagaggtgctggacagcagccgcttcttctgcttcttggacaggtcctgcttcacaccgtgcacatactgcccgcagggggtcttggcaagggtggaatagaacttctcaatgtcgtaggttcgcagttcctgcaccttccgttcccgatatacggcacgataagattctgcaccatcgccacagactgggtgtaggtcttgggagaccatttgtgcttggtggactgaatcgggatccatttgtacagcatctcctccaccgtcatggtgtcggggacaaggaacgtgccgtccagcagctctttctcgaccgtgatctttcgctcctgcgcctcctttttggtcttgaaactctcccatccatcgcatggcttgccggaatggtctttgtacttgtaacggacggagtaggaatctccgcgcttcatgatagatgccatagattacctccctcagaccgctgcaaaccagttgtcgaagctctgcttgttcacccggatgctggtgccgatgcgcagcacccggaaatcctttgtggtgttgcacaggttgtacgccgcacggggagaaatcgccaaaagctgggcaatctcttcaacccggtaaacaaggggctcgtgcttggctgctttggtctggtcagaagattctgtggcaggggatttggacgctttcattgtaaccgtgttcgagtccttttgcaaggacttattcgtataatctttaaatttcacatcttcggtcatgtcaggccgattcatattcataggcagacctccgtttccttgtaaccgggtgccggggcaaaaggtgccagctttttgccccaaacgctcccgatgaggttcagatttccgagtgcccctcctgtgtgcggggttgtgccgttggtttgttcgtctgttctgcctgcaaacggctcagcagttgcagaacggaatctcgtgctttctccttgacctgctccttgcccttctgtcggacatccggcttcagcagcttctcctgcaagcgggtagcggtggtttgcatggttttgagaaacttgtccagcacagtgtccagacggtgggcggcatattccctcgtggctttgggagccttgcgttctggggatagcacccacttcttcgtgtcctcgatcatccgcatatcttccttgcgggtctcggtgcgcaccacatcggtcacgacctccaccgccttgtcataggccgcagccgaaacattttccagcagggtctccatatccgaaactttcagggtcaactcgtccagcctgttctgctgggcggcaagccgctctttctgcttggcaaggatgaagtcctgcttttccagatatttgcggttgccgtactccgcttcttcctccaattccagcccatgcctttttgcaatctcgaacagcattttccgacaggcggcatcaaaggtgatcttgcggttgttccggcggctgaggggcttgcctgggttcggcaagtcgaaacctaacgcttccagtgccttttcctgctggggtgccacctcaccatatttgttctcgcagtcgaacacatgacgctcatggatgtggggtgtgctttcgtccagatgcaatgcccagtccagcacatgaacatgttcgccaaacttggtcttgaacgcctcgatgaactccgtgacgatgttcagcaagtcctccgccgaagcgtgttcatccagcgttcccagctggtagatggtctcttccgggcaggtcttgcggctggacaacaggtcaggaatggagcggttgcgctccgtgtgccggatcttggcattacgctcgttctggctttccacaaaagccgtgtagtgggtttcgtagaactgccgttctacgtccgagaaggttgccgccaaatcgtccgggtcttgtgggtcaagagccgaacgaaagccgtggaagcagtcccagtagatgttgcccttggctcgttccgggtcgatgtgctcactgttggcaaggttgaaactgcggtcattgtgcttggggttgtaagtgccgtgtgctccggctcgtccgttgtgtcgcgttaatttcagatagacattcctccgtttcaacagcttggcggggaaagcgcagcagcggagctgctggatctgccgccgttttgcgccagataatacccagtaggatatgacgcacagcatcatatcactgggcaaggcgttcccccttgactcccttcaacgggctgcggtctcgcctgtcggctcggtcggtgcttcaaaatgcctgcggccttttgaggtcgccactggcgacccgcacctctgcactcttgctccgggcaagctgtcccaaatggacagctcgtccggttttttcagtgggccactttgacccactgatttcgttacggtcagaatcaggttgtcatcttggcaacctgattttcaacaggccttgaggcgttacggaaaaacgatgtgctcattttgaccacttggttttccgtaacaggtcgataaatttccgttccctcattcgtgaggaactgggtttcatttggcagatgcgttacacttatccaagtgctcattttgagcacttgcagcatctgtaacacgttttcgatagtctttttgccgacaggcattgctgcaatagtgggcaccttcacgtttgggtgtaaatttttcaccacagcactggcagaccaaatcctgacggcgcatttggcggtattcccgctgccgccgattgttggcctgattgccgcaccagtagctgtgacagtatttcttggtgtagatggtggtgtagaacacccgaccgcagccgccgcagataagtttgcggacggcgtatcctccggtggtaaaacccgtttcctcatacgattctttcaaataatcctgattgttctgttcccattcttcgtttgtcatatacatggagatacccctcctttcactggcgttacggaaaaacaatgtggtcaatttgaccacattgttttctggtaactggggaatcaacgtttagccgttctccctgcatggatttcctgcccccttccggcggcgttttccggctctccttctcagggtcatcgccgtgtatcccatgcagacggtcatgcggttgtcaaggtgcggtgctggatttggcaataaaaaatcgccacacaacaacctgaacctgcccatcccttctgggatggccttggctcggattcgttatgtagcgataagaaagttaaaaacttgctccggctccttcgggagccgagctggaactctaagtaaatatgttatattaaattgttgggataggttaccacaaaaatcgagccgtgtcaacaaaaagttttgaaaacaggctactttcggcagattgcgagaaaaaatgatggaaaccttggtaaaaagagagggctggatagctcgttctgtttgcaacggaatgcaaactcggaacttttccgagcagaaaaacaaccgtctgcttcaagttgagcttgaaaacggacgatcattcttgcaaaatgattgtcaaatttgggaggcgttttgagcagcctcatagtgctaacaagatgtatcttcacacgtatatatataccatttttgcgttgcaaaatacttgttggggaacacccaagcccttgaactgcatccgatggatgcaggctgcacgtttttgaaaaacgctctttcggtgctccgtatgaagcaccgaaaacgaacccgttgagggtcaaaagcatcaggtggggtcggtaggctccccggcttcaattttacccagataccgccacagggtcgtgcggctgatgcccagctgccgggcggcggcggcgcggttgccgccgtgggcggctaccgtctgctgcaccacctcgccgatgatgctttccagcgtgcgggaggtgtcggtgctgaccaccgccgccgggtgcgctgccggggcgctgcgcagactgcgctccttggagagcaggtcggccacgctgctgctgcggatgtaggggccgtttgtcagggtggcaagggagcgcagcaggtttttgaactgggtgtagttgttcggccacgggtactgccgcagcatctcgatggcgcggggctcaaagccggagatctgcttgcccagctccagattcaggctgttcaggtacaaactggaaagggacgggatctcgtccgagcggctgcgcagcgggggcagctccagcgtcagtgcgcccagccgctcgataaagcggcgggtgaccggcgagactggctcttccgggcgcaccgagcgggagaacagcagccgcacccggcgggcaagaccggtctcctcgatggcagccagcagttcggcgctccactgttccgggatagcctcaaagttctggaagtagaccgtgttgccgttggcgttcaggggcgagttatagtggttgagcagaaaatcccatgatttatcgttcatcaaggcgcagttcgccaccacgagggggcggtttaccagtgcactgtgcaggtagaggtagcgggcaatctgctctttgccggtgcccggctcgccgcagatgaacaggggctggcgcacggcagcaagggcgttgatctcggcgtcctgcgtgcccatggcaccgctcaggctgtaaaagctgttagagaaaagatattcgcactcgcctttgttcagcgaccgcagccccgggcggttggaatgcagcgggatacgggagggcacgcagtagaacagataccgctgcacattgttcatcagcagcacctgtgctgtgatgctgtacagctggctacgctcggtgtaatagaactttaagctgcccgtggcggggatctcccgcagatgggtctgcaaacagcggtgcagctccggggagatgtccttcatattatgatagtacaggctgccatccggctccatcaccaccacccggccgccctgctcctgcgtgatgctgcgtagaaacaggttctcctgccgcagctggccgaaccatgtgctgatgttcaccgcctgatcgatggcgctgtgcaggctttcgatgccggaggtgatcaggaaggcgtcaaagcccatctcccgggcaatggtgtgggtgaccatatcacagaccaccatccggtagccgccctgcttgagccgctccaaggtgtggcgcacctcctcggcactgcggacggtgaggatgtccaaatcaaagttcagcaggctgcaaagggtgtgggcgggttcggtgatgctgggaaagcccacgatggcgtacaggctggtgtagttctctgccagtttcatggtgcgcagcacatcatacaccgagatatggatatccacaaccggcaggtcggtcacctgccggatcagggtggcggtgccgccgcgggagataatgcagtcgtagctgttgggggccatgcgctgcacgatggcctgtccctcttccagatcgccggtgtacacctccagctcaacgttggggtaggcctgcgccgcctgctccatggcggtgcgcattccgtcgtagggggcaatgcccagaatgcgggtgtgagtctcgaccataaaacgtccctccgtgtttctctttgaaactattataaacggtctggttcaaaaagaaaacagaatatggtttcaaaatagaacgtttttgccaacaaaacaaaaagaaaattgaaaacgtgctaaaatgaaacgcttttcccgcttgcgccgggtgcattcccgcggtggatacggcataatgaaagcacaaaaacaagtgaggaggcacgaacgaatgcttcgcctgctgatgattgcagatgattttacgggtgcgctggacaccggcgtacagcttgcggcacacggcatccccacgcaggtcgtggtggggcaggcagacctttccgcgtgcagcagcaccgtgctggtggtggataccgaaacgcggcatctgtccgccgcaaaggctgccgaggcagttgcaaggctgacccgcagcgcggtggaaaacggcgtgggctgcatctataaaaagacggattccgccctgcgcggcaacatcggcgcagagcttgccgccctgctcaaagcaagcggcgcacgcaatttgccctttctgccggccttcccgcagatcggacgcaccacaaaaaaaggcgtccactacatcgacggtgtgccggtgaacgaaagccccttcggcatcgaccccttcgaaccggtgcgctgcgccgaggtgacaaagctgatccatttgcagactgagatccccgcacagaacctgtgccccggcgagacggcagcggacaagaccggaattctggtgtatgacgctgcaaccgccgcagatctggaaaccgccgggcgacagctgttccagaatggaacacccccggtgctggcaggctgcgcaggctttgccgcctttctgccggagctgctggggctttcggacggcagcgtggtcgagaccccgcagctggacccccggctgctggtgctctgcggcagcgtgaaccccatcaccctgcggcagatggacaccgccgaaaaggcaggctttgcccgcctgcggctgaccccccggcaaaagctggagcccggctactgggcaagcgccgacggcaaggctgcgctggcagaaattgaacagatgctggcagcaaacccccgctgcatcatcgagacgaatgacgccgggggcaaccagcttaccgccgattacgccgccgcccggggcattgacttggacggcatgcgagtgggcatttccggcagcgtcgggcagatgttcggggcgctgttcggcagcgaacatctgggtacgctgctgctcaccggcggcgacaccctgctgcaatgtatgaacagcgtgggcgcacgggagctggaaccggtgtgcgaactggaaagcggcatcgtgctggcgcggttcacctatcaggggcgcacccgctacgtcattaccaagtccggcggctttgggcaggaggatctgctggtggagctggcagaccgcattgcaaagcattgagaacagaagcagacagccctttgcggctggaacagaagataaatgtaacagaaggagaacgaccatgacctatgcaaaactgcccggcctgacctgggacggcaccgtgtacgagaacgaggagatgggcacactggaagccctgctgcccaccggcggctggcccaccgcccacgcacctgccatggtggagctgcccaacggtgacctgctctgctgctggttcgccggtacttatgagggcagcgcagatgtgcacatcatctgctcggtgctgccgcatgacggtaccaagtggctggagccggtgaatatctccggcgaccccacccgcagcgagcagaacccctcgctgttctacggcccggacaacgccgtgtgggcgatgtacactgcccagctggaccgcgtagagggtaaggacaatatgcagttcaccgctgtggtgcgctgccagaagagcaccgacggcggcaaaacatggggcgactacaccaccgtgttcccggaggaaggcaccttctgccgccagcccattcaggtgctgtccaacggccgctggatctttgccaactggctgtgcaccgactctgccgagggtctgtccggcgaccccaccgccttccgcatctcggacgatgagggcaagacttggcgcatggtcatgatgcccggcagcaacggccacgtccacgccaatgtcatcgagctggaaccggggcatctggtggcctttatgcgcaaccgcgaggcctaccgcatccaccgcagcgagtcctttgactggggcgagacttggacggtgcctgcacccaccccgctgcccaataacaactccagcatcagcgcggtcaagctgcagagcggccgcatcgccattgcctataaccccacctgcacccccaaccccgtgcccggcaaggctgcatggcccggcctgcgctgcccggtggcggtggcgctttcggaggacggcggcctgaccttccccatcatccgctggatggagcgcggcgagggctacatgggcgatgagaacaagaccaacaacaagcagtacgagtacccctacctgatgcagggacgggacggcatgctgcatctggcctacgctgcccgcacccggcagggcatcaagtatgtccgcttctcggagcaggacgtgctgggcgcaaagcgggagaccgtgggtctgtataaccccaccgcagcgcagagccgctgaaaaagcttttcgagagtttcatcctttttatagatcagaacatcattcaggaggttgatcagtatgctgacccagtacaatcttaaaatgccgcacgcagtttacggcggcgagaacgctatggacaatatcactgccatcatcaaggcgcgcggcgcaaaaaaggtagccatgttcaccgataagggcattgagggcgcaggcctgtttgccctgccggaagaggctgtcaaggcctccggcgcagagtactatgtgctggacgagctgcccccggagcccagctacatggctgtacagaagctggtggacgagttcaaggtctccggtgcagacctcatcgtggcctgcggcggcggctccgtgatggacgctgccaagctggcaagcgtgctggtgaccgacgcctacggcgtgaaggagctgctggataaccccggcatggcacagaagtgcgtgcccatcgtgctgatccccaccaccgccggtaccggcgccgaggtcacccccaacgccatcgtggctgtgccggagaaggaactgaaggtgggcatcgtcaacgagaacatgatcgcggactacgtcattctggacgcccgcatgatcaagaacctgccccgcaagatcgcagccgctaccggcgtggatgcgctggcacactgcatcgagtgctttaccagcaacaaggccaaccccttcagcgatctgtacgcactggaaggccttgacctgatcctgaacaacatcgaaaaagcctgcgatgaccccgaggccatggcagagaagaaccggatgcagatcgcagcctactacggcggtctggccatcaccgcttccggcaccaccgctgtgcacgcactgagctacccgctgggcggcaagtaccacattgcacacggcgtgtccaacgccatcctgctggcaccggtcatgcgcttcaacagcgagcaccccgccgtgcgcgagcgtctggctgccgcctacgaccgctgctgccacgaggaaaagacctgcaccaccgtggaggaaaagactgcatggatgatcgcccgtctggagcacatcgtcaagcatctggatatccccaccagcctcaaggagtttggcgtgcctgccgaggatctggaaggtctggtcaacgccggtatgcaggtacagcgcctgctggtgaacaatatgcgccccgttaccgccgacgacgcacgcaagctgtatcaggaaatcatgtaacagaaaaggagtaaagacttatgaagaccagcgatatcaagggcatcatccctcccgtaatcacccccatgaataacgaccctgagcagacggtcaaccatcaggctctgcgcgagcaggtggagcgcctgctggcaggcggcgtgcacggcatcttccccatgggcaccaacggcgaagcctacgccctgtccttccaggagaaggaagagatccttgccactgtcatcgatcaggtaaagggccgcgtaccggtctacgcaggcaccggctgcatcaccaccgccgagaccatccgcctgagcaagcgtgccgaggagctgggcgcagacgcactgtccatcatcacccccagctttgcactggcctcccagaaggagctgtacgaccactacaccgctgtggcaaaggctgtgaacctgcccatcatcctgtacaacatccccgcccgcaccggcaacaagctgctgcccgagaccgtgcaggcactgtgccgtgacgtggagaacatcgtgggcgcaaaggattccagcggcgatatcgagaacctgaaggcctacatccgcctgacccgcgagctggataaggaagttgccattctggccggtaacgacggcgccatcctgacctgcctgaaagagggcggcgcaggcggcattgcaggccgcgccaacatctggccggagaccgttgccaagatctacgattgcttcaaggccggagatctggagggcgcacaggctgcacaggacgccattgccatcctgcagcagaccttcaagtacggcaaccccaacaccatcatcaagaccgccgttgccctgcagggtcaccccgttggcaagtgccgcgcacccttcaactatgtgccggaagagggcatggaggccatcaagaaggttctggcagagaacgaggccaagggtctgcactgaaacgcactgaagcaaggagaaggctgctatgaataaacccattgtcggtattaccatgggcgatcccgccggttccggcccggagatcaccatcaaggctctggctgacccggagcagtacagctactgccgccccatcgtggtgggcgatgtgaaggtgatggagcaggccaagaagttcgttggccgcgaggacatcgtcatccaccgctgcgagaaggtgtcggatgccctgttcacccccggcaccatcgacgtgctgcatctggatctgatcgaggacatcagcaagtttgagatagcaaaggtcagcgtggagggcggcaacgcagccttccagtgcgtgaaaaaggtcattgagctggccatggcgggtgaggtggatgccacctgcaccaacgccctgaacaaggaagccatgaacaaggcactggagtactaccacggcgaaaagtcggacggttacacccactttgacggccacaccgagatctacgccacctacacccacaccaagaagtacaccatgatgctggcccatcacgacctgcgcgtggtgcacgtttccacccacgtttccctgcgggaagcctgcgaccgggtcaagaaggatcgcgtgctggaggtcatcgagatcgccaacaaggcctgcaaggatatgggcatcgagaacccccgcatcgctgtggcgggtctgaatccccactgcggcgagaacggcctgttcggccgggaggagatcgaggagatcacccccgccatcgaggctgccaaggccgagggcattaccggcgttgtgggcccctgcccgccggacagcgtgttctcgcaggccctcggcggctggtacgacatcgtggtgtgtatgtaccacgatcagggtcacatcccgctcaagaccgtgggctttgtctacgaccgcgaaaagcaggagtggaaggccgtggagggcgtcaacgtcacactgggtctgcccatcatccgcgccagcgtggatcacggcaccgacttctaccacgccggtaagggcaacggcaacgagctgagccttgtcaatgccatcaaatatgcggtcaaaatgaccggccgcgccaactaagttatccccatcccaaccaattcttcattttcttccagagagagccgctgcaccccgtacggtgcggcggctttttctggttttggggacgaactccctcagggagcgaaccctctcaggcgcttccgtgccagatgaggggcagcacccgttagccttgcacgccctctcaggcgctcccgcgccagctctcccaaggggagagccaaggtctaaggctcgttgctaaagtattaggttcaatgaggaagttttcggcagtgctcttggctctccctttgggagagctggcaaagccgtaggctttgactgagagggcgcacggcgatagccgtgacggaaagggtgccctgtttcaaaaagcaacaaatcagccgaaactaaccgcaatatgtttcaaaaagcgacatattgcggcaaaagaattgaacaaattctgaatatgtttcaaaaaagaacacaacgagcccaaaaatgattgtgacgcacagcggaaaactatatacttttaatcaagaaagccgcatcggaattgtgcaaagggtcgggctcttgcgcaacaggtactgcggacacaaaaaaggaggaaacgttctatgacacttcccatgatcattgctctggcagtgactgtcctcatgatcatcctgatcatggtggataaactgcccttcggtgcacccccgctgctggcgctgctgctgctggtggtgttcggcgttaccgacatcaagaccgccttcggcggcttcgcaaaccccaccatcgtcatgctggcatccttcatggccatcattgcggccctgcagaagaccagcttcatcgtcaagttcaagcagaccatgttcaacatggccagcaagggcggctttaaggcctacgtcctgctgatcctcatcgttatgctgggatgcagcctgtttggcaccggttccaccgcctactatgtgctggtcatcggcctgctgtccactctgccctactccaagcagctgcccccgtccagggttctgatgcctgcgggctttgcagcaaaccacccgctgctgcccttcaacaccgctctgcagtacggcatcgtgatcgccgttctggaaagcgcaggcgttgcggcaaacgtcaatctggtcaagttctctctggtcaacctgtgcctgtccatcggcttcttggtgtggtgcgtcctggcctacaagatcctgccggaccaccccattgccgaggccaaggaagaggctctccacgccggtgagcagaaggtcgccctgaccaagaatcaggagctcatcacctacttcagctttgtgctcgccgttgtgggcatgatcctgcagagcaagatcggtgacgcaggctacgccatcaccggtctggccgtgggcatcatcctgatctccggcgtcatggacttcaacgagatccgcaactccatcagcgcacccatcatcttgatgtccgcaggcgtcatcggcatcgccgatgctctgggcaacaccggcctgaccagtctggtcggcgagaccgttgccaagatgctgggcaccaacgtcaaccccttcgtgctgatcttcgctttctgcatcctgaccagtgtgctggcaaccctgaccggttccaccatcggcaccgtgtacgtctttgctcccatggccattgccacctgcgtcaatctgggtctggaccccaccgcagccgctgccgctatcgtggtctccggctggtgcggacacttcctgcccattgacggtatgcccgccatgatcatgggcgccggtgactacaagatcaccgagttctggaagttcaccattccgcagtacttcatccgtctgctggcgctgacggtgggcgctgtgctgatcttccccatgaagtaacaggagaaacgcaaaatgaaaaacacgtttgagctggagcacgtcggcatcaacaccgacaacgcaggcgaggccgagcagctggcgctgctgctgtgcaagctgttcaacttagagccccgccacggacagaagtccgagtttgccggtaactatttcgagtgcatgaagagcccctttctgggcaagaacggccacatcgcaatgcgcacccccgacctgaaggctgcgatggaggagctggaggaaaatggcttccgcttccgcatggagactgccgcctattttgaggacggccgcatcaagaatgtgtatcttgagggcgagtacggcggttttgccatccacatcatgcagaaataacgccaactgaccgatcttgtgcagaaccggggatggagcgatccgttcccggttctgtgggttcacgccccgcgaaaaatcagaggagaaaaattatgctggttcctgtattgctatttatcgtcggtctgctgttcctgatcaagggcggcgactggttcgtggacggtgcttcggcactggcacggcggttccacctgccggagctgctcatcggcgcaacggtggtgtccatcggcaccaccctgccggaggtcatggtgtccaccatgtccgccgtgtccggccatggtgagatcgcctacggcaacgccatcggctcggtcatctgcaactctgccctgatcgccgccatcaccatcgccgtccgtccgggcaaggtagaccccaagaccctgcgggtgccggtagccttcttctttgccgcagccgccatctactgcgtggctgcctacgccatgggcgaattcacccgcccgctgggctttgtgatgctggccatgttcgtggcctacatggtggcaaacgtattgcagatgaaaaaagcccctgccgccgccgaagcggaggccgaggccgaaaatgcaggggaagagatgtcccttaccaaaacgctggtgctgctggtgctgggcgctgtgctgatcgcactgggcgcaaacctgctggtggataacggcaccctcatcgcacaggcactgggcgtgccggagtcggtcatcgcgctgacctttgtggcgctgggcacctctctgccggagctggtcaccgccatcacctcgctggtcaagggctgcagcgatttgtcccttggcaacatcgtgggcgcaaacgtgttcaatctggtgctggtcagcggtatgtccgtcacgctggcgcccttcaccgtgccgcagagctctactttgttcggcatcaattccagccttgtgctggagatcccggtcatgctggctgtcatgatgatcatgacccttcccgcactgaagcgcggcaagctgtcccgtgcacagggcattattctgctgtgcatctacgctgccttctgcgctatccagtttaccatgtgacattcccggagatacttccttgcccccggcctgctctgtcaggccgggggtcttccgttgtaccggcaggaaagcagtttcatcatagtggtatcctccaagacttgatttttagtgtgcggccactcaaaccaatgccgtcaagccggtgaggatagggcgattttatttgtcggagagtaagtgcacggtttctgcacggattttgcacggtttcaaaacgtgcagaaggtgcttttcgttgcaaaatccgacaaagggtgcagaaattactgggtgaaaaatcacgttgtcttgattaaaaataacgatgactcgaaacttccataaattgagacgaaccggcggcttgctctcttaatcagtgggcccagggttcgagtccctggaggtgcaccagattttgaacgctaaatcgtaagatttggcgttctttctttatgtagaaaagtggctgcacactttctgcacaccgcttgcacatttgcccaaatcaggggcttttctgcaaccgcttttgggctttctatgctacaatagagccatagagaggtgaacgaaaatgctgtttggtcgggaatatatgccggagggcgcgggtgttgacccggacgcgccccgcaaaaaagctgcaacccggccagattccgcaggcgtataatcccatcggggagtaccagcgcagcttcaccatgccggaaaactgggccagctgctacctgcgcctgaacggtgcgaccatgaccgacctgcgggattggctgaaggcgcacaacattgtgacactttacaaaacgcaaaatcgcctgacgaaaaaactgctgcacttttcagattgaaaaaagccgtaaaaaacgctatactttcgctaacggaagcaaaggcgcttggtgagaagatcaccaggcgccttttttgcactctgcggcgcggcttccgctttacggctgggtgagcacctccgggtcaccgggcttatagatatgagtcttggccagacggcgcatggtgtcctcgtggttgcggctggcgtaggcggtgtacaggatatccattacgttcagctgggaaaggcgggaggacatggcaccgttgcggaacaggctctcgttggcggccacatacagcacatggtcggccagctgtgccacctcggaggggtagtagcgggtcactgcgatcaccggtgcgccgcccgccttcatctccttgatgcactggatcatctccatggtctgcccggagtaggagaacacgatgcccacatcctgcgcagtggcgttgcgtgcctgcaaaagctgcgagtgggagtcctcgttgaccacgcagggcttgtccagacgcagaaatttcaggtaggtgtcttttgccacgcacagcgaggaaccaatgccgaacaacagaaccgtacgggcgttggcgatcagttccacgcactgctccagctcatccagcaaaagcagccgctgggtgtccagcaggctctggatgttcttgtgagtcaccttgtccacgatctcctgcaggctgtcctgcggggtgatgtccttttcccggtggctgccgttctccccaagggtggcaagctccagcgtcagggcgtggcgcagttccttgtagccctgaaagccgatcacccggcagatgcgcaccacgctggaaggggaggagaaggagcgccgcgccagatcccggatggtaagggtggtggtctcgtccggattctccagaatgaactgcgcgatctgccgctcggtgctgctgagggagggctgcacctcccgcaggcgtaaaagaacgttctgcatatagatacctctgttgtatttcaggatggattgaacaagctgcacaaaaaagtcgtacttgtgcgcaaaaatttcaaaaacaatgcttgcataaaacattgtaccacaaaatagtctttttgtggacattttgtttgaaaaagtttatactttggtcacaatcacgccgcaaggggtgcggcggaaactggaggtgcaggatatgggtttgaatctgagtgggatgaccaccgagacccgcaacccgcgcacgatgcagctggaccagatgtccccgctggagatcgtgactgtcatgaacgaggaggacgcccgggtaccgctggccattgccaagtgcctgccgcagatcgcgcaggcggtcacatgggcggcagaatcctttgaaaaaggcggacggctgttctatatgggcgccggtacctccggccgcttaggcgtgctggatgccgccgagtgcccgcccaccttcggtgtgccgaaggagatggtggtagggctcatcgccggcggcgaaaaagcctttatcgaggctgtggagggcgcagaggacagccgggagctggctgttgaggatctgaaagcccacggcctgaccgcgaatgactttgtggtgggcattgccgcctccggccgcacgccctatgtgctgggcggtctggactacgccaagagcgtgggctgccacactgccgccattgcctgcaatatcggcagcgccatcggcaaggccgcagagcttgccattgaggtgaattgcggccccgaggtattgaccggttccacccggctcaagtccggtacggcacagaagctgatcctgaacatgatctccaccggctctatggtgcgcaccggcaaggcctaccagaacctgatggtggacgtgcagcagaccaacgaaaagctgcacacccgcgccgagaatatcgtcattgacgccaccggcgtggagcgggagaaagcccgcgccgccattgacgcagcgggcggcagcgtaaagaccgccatcaccatgctgctggcagactgcgatgccgcagaagccgcccggcggctggaaaaggcccgcggccatgtgcgggaggccatccggctggaagtgctgtaagatatctctaagttccttagcggcaaaggccgcatcggatatacacctgttttaaaggaggacccacttatgacgaatgaagaactggtccgcgcggcgctggagaaggtcggcggaaagagcaacgttctcaccgcaaccaactgcatgacccgtctgcgggtgcgcgttaaagatgacgccaagatcgacgacgagggcctgaaggccatcgagggcgtgatgggcatcgtgcatgaccgtaccggctatgtggagatcgtggtcggccccggcaagtgccgcaagtgcgcagatatctgccgcgacatgggcatcccggcggacgccgccgcttccaccgccaacgactggcagaccaacaaggccgcagtcaaggccggacagaagcagagcaaggtcaaggagctgttcaagaccttcggcgatatctttatccccctgatcccgggcgttgtggcttccggtctgtgcgccggcatcaactccctgatcggtcaggtggtgccgaactacgccgacatccccgcactggctctgatcagcaccctgctgggtctgatgaacacctgcttcctgggctacctgaccgcatgggtcggctaccgcgcagccgaaaagttcggcggcacccccattctgggcggtatgctgggcatgatcaccggtttggacggtatcaacaagatctcttccattctgggtctcttcaacgaggctgtgccgctggattccatcctgcgtgcaggccgcggcggcgtgctggccgttgtgctgggcgcatggtgccttgtcaagatcgagcgctgggtgcgtaagtggatgcccgaatctctggacatcgtgttcaccccgctgatcaccatgatcctgtgcctcgtgccctatatcctgatcatcatgcccgctaccggctatgtttccaccgcgctgtgctgggtggttgaaaagctgtgcatgagcgatatcctgatcgtgcgcatcattgccggttatatttccaccgctctgttcctgcccatggtcgctatgggcatgcaccatggtctggttgctctgtactccgtgcagctggagagctttggctacgttaccctgtaccccgctctggctatggccggtgcaggtcaggttggcgctgctgtcgctatctacttcaaggctaagaagtgcggcaacacccgcctgaagaacgttatcaccggcgcactgcccgcaggtctgctgggcatcggcgagccgctgatctacggcgtcaccctgcccatgggcaagcccttcatcagcgccggtctgggtgccggcttcggcggtgccttcgttatggccatgcaggtggctgctaccgcttggggcccctccggtctgctggctctgttcgtcatgaccgccggccctcacggtgtggctgcttccgttggctgctacgcagtgggtctggtcatctgctacatcatgggctttatcgtgaccaacgcaatggtctctgttgaggacgttgccaatgcttaaaacactcggacggtcagtgtatctgacgcagtttgaggaacagcgtgcgtcgctttccgcttttgcggcaggcggcgcgcctgtttttatctcactgcatatcagcgaagaatttgatgccgcttactgcgcccgcgtgcaggaaatgtgcgattttctctccgcacagggctggcgcattctggcagacgtgtcggaaaagaccatccggcagtttggctgtgccgacctgaccgcgctggcaaagcggctgcacctgtggggtctgcgactggattacggcttctcgctggaggaaatgtgcgcccttgcgcagcagctgcccgttgccgtcaacgcctccaccaccaccccggaggtggcgcggcagctggcggcgggcggcggcacggtcatcgccatgcacaacttctacccccgcccggagaccggtcttgacccggaatttctgcgcgagagcactgcagctttgcaggcggagggcttgcaggtgtacggctttatccccggcgacgccctgctgcgtgggccgctgtacgcgggtctgcctacgctggaagcccaccgcaccgctgccccctcggcggcctttgcggacttggcactgaactacggtctggacggcatttttgcgggcgacccggaggtcagcacccgggagcaggagtatatccggcacttctgcaccaccggcgagctctgcctgccggtcgccatgcgccccggttatgagacgctgtacgaccgcacctttacctgccgcccggattcgcccaaagggcttgtgcggtatcaggaatcccggctctactcctgctttggcagcaccgtgcagccggacaactgcgtggagcgccgccgccgctgcgtgaccatggataacatcggctacggccgctactccggcgagatccagcttgtgcgcgctgacttacccgcagacgaaaaggtgaacgtcatcggtgaagtgcccgcagaatacgacctgctgctggactgcattaagcgcggaaagaccttccgcatggtaaaagtatcataaatcataacacaacacccccggacagctctgcgtgctgtccgggggtgttttttatggttcccttctgtgaaaaaggggttctgaaaagtccgcgtttgcgcagcaatgaaagccccagtggggcttttaagcggcagagcggtctgcgcaagcagatggaggggctttgccccgacaagctccgcagacttttcagaaccccaaaattcaaaataaattttccgctgaatatgcgcagagcgcaagcggagcgcattcagatggttttcttcctcggatacacaaaggcgtcgcggcggtacaccgccacgagatatgccgccatgaagcaccagatgatgggctcgcacaggatgacggcgttgtaggcgtagcgcgggatgaacaccagtacaaaaaccaccttgcccacaagctcgatgacgctggaaaacagcggcagcaccttctgcccaaggctctgcaaagcgtaccgggtgcacagcagcacccccagcaccgcgtagaacggcgcgttccacatcagataccgtgcgccgttttccagcacgaggggcgcggaggaaccggagatcagctgcaccagctgccgggcaaaaagctgcatcagcaccacctctgccgccatgatgaccaccgagcacaggtacatggtgcgcattcccttacgcacccgctccggctgggctgcaccccggttctgggagacaaaggtggagccggcgtttgccatggagatcagcggcatactggtaaaggagaacagcttgcgcgcggcggtgtgccctgcaatggtcagcgtgcccagcccgttgatgccgtattgcagcaccaccgaccccgccgacacgatgctgctcatcagccctatggagatgctctggctgaacagctcccagtacaaatgctgtcccaccgcccagtgcttgcgggcgggcagcagcagcggcacgcggcgcatcacatacagaatgcacagcaccaccgagatgccctgcgcaatgacggtagccaccgccgcgccctgcacgcccatgcccagcccggcaatgaaccacagatccagcgctacgttcagtcccgagctgatgagcaggaacaccagcggcatcacgctgttgccgatggcgcgcagcagcccggcgcacaggttataaaagaacatcaccagcacgcccaaatcgatgacgatgatataccggtaggcgtcctctaaaatttcggcgggggtgtccagcagctgcaaaagcggccgcaggccgaaaaagcccgccgtggtaatgacaaagcttgcgcaaagcccgatgaccagcgccccggccaccgtccttttgagcagatcctcgtcctgtgccccgtaggagcgcgcagccacgatggaaagcccgttgccgatgccgatgccaaagcccaccagcagctcgtagatagacccgcaggagccgatagcggccagtgcggtatcgcccagcacgttacctacgatcatggtatccacggtattgtacagctgctggaataaattggacaccagaatgggcagcatgaacagaaaaagattcttgaaaataggcccgtgcagcaggtctgcattccggttaaagaggtttgttttcaggggtcgcgtctgggtcatagggttcctttcttcgcgcaaaaaggaggccgttgcacattttttgtgtgcagtggcctcttttgcggtaaaacgatttgaaaaaattttatttgtgtagttgcgaaacaccgtaggtgtttcgcaactgcttttttataactcctgctgctcaaacccgttgacggtcagcacggtcagggcggtgaaaccggcggccttgatggcggcggcggcttcgtcaaagccgaaggtcagcgcggcggtgtcgtgggcgtcggcggtgatgatcaccctgccgcccagcttgttccactcgcccagcagccatgcgccggggtagaagtccttgcggtagccccggtatacgccgccggtgttcacttccaaaatgcagtcgttctcccgggcagcttgcagcgccctgagcgctgcggccttgtagcggggggattcctcgtcaaaaaagctgccgtccgcgttcagctttttgacaaggtcgatatgtcccagaatatccggctttttggcggcaatcttttccacctcggcaaaataggcttctaccgctgccagcgggtcgccgtcaaaatcgttgttgatgcagtcccgcagatcctcggggcggaaatcgatctcgtagtatttgccggtatttttgccgtacagatggtgcgcgctgccgatccagtaatcaaagcctttgggcgtgccctcgctcagcaggtcccactcgatgccgcacaggatgtccaccttgccacggtactcgtttttcagcttggcaatggtggcgcggtactgcgcagtgcggccgggggtcatgcagtattcgcggtcgggcgttgtgtagctgtggccgctgaagccaagggtggtcaacccctgcgcacaggcggcaccggccatctcctgcagggtgtttttgccgtcacacagggtagagtggcaatgtacgctggattttctgtaatctgccataggcttctcactgcatcctttcctgcttgaccttgtggtcgatgacatggcgcttttccagctcccgggtcacatcctctacggtaatgcccgcgctgaccatcagcaccagtacatgataggcaaggtcgctgatctcgtagaccgtctcggccttgtcctctttttcgcccgcaatgatgacctcggtgcactcttcgcccacctttttcaggatcttctccttgcccttttcaaacaggtaggtggtgtagctgccctccgtgggggtatccttgcggcccttgatgaggttatacagcccctgccagctgaactgcttcagctccggggagacgtatacctcgttgaaaaagcagctctctgccccggtgtggcaggcggggccgtctttcaccacctctaccaccagtgcgtcggcatcgcagtcagcggtaatggacaccacccgctgcacattgccgctggtctcgcccttgcgccagatctcctgacggctgcggctccagaatacggtgcgcccctcggcaatggtcagcgccagcgtttcggcgttcatgtaggcaagggtgagcacctgctttgtgtagtgatcctgcacgatggcggggatcaggcctttttcatcaaatttcagttccatgacggttctccctccccggatggggatattgtgtattttatcgtattcaagataaaaatgcaaggtgtttttgcgttttttacagccgcatttccacgccgcttgcgttcaggtattccttcagctcccggatgcccagcagcttctggtggaagatgcccgcagccagcccggcgtcgatgcccttgtggtggaacagctccagaaaatcctcttttttgcccgcgccgccgctggcaatgatggggatgttcacccgggcagccaccgcgtccagcatttcaaggtcgaagccgttgcgcacgccgtcggtgtcgatgctgttcaggcatatttcgcccgcgccgtgggcggcgcaccagctgatccagtccagcgcatcccggccggtatcctcgcgcccgcctttggcgaacacccggaactggccgttcacacgcttcacatctgcggaaagcaccacgcactggtcgccgtaccgctgcgcggcggcggggatcagcccggggtctttcagcgcgccggagttgacgcttaccttatccgcgccgcatttcagcacccggtcaaaatcctccagtgtgttgatgccgccgcccacggtcagggggataaaaatttctcccgccacccgggtcaggatatcggtaaagagggcgcgtccctcaaagctggcggtgatatcgtaaaacaccagctcgtctgccccggcggcattgtacagccgtgccatctccaccgggtcggccacgtccttgatgccctcaaagttcgtgcccttgaccacccggccatcgcgcacgtccagacaggggatgatgcgtttggttatcataaagctccctctttctcagtcctgcaccagctgcacgcagcgggcaaggtccagcgcgccggtgtacaggcttttgcccagaatcgccgctgccgtgcccatctgctgcaattccagcagctctgcctcggaggagatgccgccgctggcggtaaaggccaccccgggcacctccgccgctaattgccggtaaaggctcaggttcgtgccctgcatcgcgccgtcacaggcaatgtcggtgtagatgatggcggtgcagccggcctctgccagccgcttgcagaaagccacgcccggctcggcgctgacctccttccagccgtggatggcaacatagccgtccttggcgtccacgcccacggcaattttatcgccgtatttttgcagcatccgggcggtaaaggcaaaatccgtcaccgccacgctgcccagaatgcagcgccccaccccgagggaaaggtatttttcaatgcgctcctcggtgcggatgccgccgcctacctcgatgtacaaaccgccctgctttgccagcgcggcaatggtgtcgtagttggaaagggtgccgtccttggcaccgtccaagtccaccacatgaagattttttgccccggcggccacaaagctgcgtgcctgtgcgcagggatcctgcccgtaaacggtcatgcggtcgtagtcgccctgtgtcaggcgcaccacctgcccgccgcgcaggtcaatggctggaaatagctgcatacattatgacccctctcgtgaaaatgcgtttggagcggcccgcggagcttgtcggggagaagccccctccatctgctaacgcagaccgctctgccacttaaaagccccactggggctttcattgctatgcaaacgcggtcgctccaaacgcgaaattaaaaataatttttccgctgaatatgcccagagtgcaacaacgacgaccgccgccagtggcggaaacagggaggagttgttggggcagcggccagcaagacgcaagtgccgcccaaggcacgatgcggatgctgggtggtggccccttaaggggctttgctagtattatgcccttctagggcttactcaagccaccggctcagccggtggttttgactatgccggtggtgggggtcgaacccacacgtgttattagcacaagggattttgagtccccctcgtctgccattccgacacaccggcgcatcggtttgaacgtcttttattataccggattccctgggcaaaatcaagagaaagtttgcgtcttttttcagatcgtcccgcatggcgtaaaatacatgactccggttcttgcccggcggcaccggctgtgctacactaaggtcagatcaaaacgtaaatgatacccacaaggagggaaccggactttgaaacatctgcattcttttgcccgccgcgcggcggcttttctgctggcggcggtgctgtgcgtctgcatcccggcggcagcggcttcggctgccaccaccatcggcggggccgataccaccctgatccctgcagaggacgaaaactgcctcagctggctgtttggctccaaggataagatcaccatgccctacctgaacatcaaggggcaggggctcaagcgcaatgtcacgctggatcttgaggactgtctggtgggcatcacctataccgagcttggctccattggcagctttgtcagcgccagcgccgcgcagcaggcgtggaaggcgcaggcggtggcggtgcactcttatctggaatatcacaagcagtacggctcgtccaccaatgcgctgatctataccccggtcgatcagatcccggcctctgcccgcaatgccatccgcaaggcggtgcaggcggtcaaggatgaggtgctggtgtacaacggcagcgtgtgcgatgcggtatggtcggccagtgcgggctacaatacccagaccggtgtgtacggtacctgcgccagtctggacgcatggggcacggatgtgccctacctgcaaagcgtggaaagcccctacgaggagcagtaccacaagctgctgcgccgggtgatcggcaaggactacacctatatagaatacaacgacagccgcaccggcgagccctaccagagcgccgacaccacccacaaggatctgggcggctttgtgcagtacaacacgctggtgtccaacggacgcagctaccggtatatcaaccagttcgtttcctcccgctactgcttcgatttcggcaccgatgccagcggcaccccctgcatgacctactacggctatggtcatggcgtgggcatgagccagtgcggcgcagtgggctacgccgccgaggagggcatgaactacaagcagatcctgcagcactactataccggggcgaagatccgtaccagcactacccgcagcggcggactgttcggctggctggcgggattgttccgctgagcgtgtttcactgaaattttggaaaaaccttctcaaacgccgcaagatttggtatactatatccgtttgtgaaaaatgaacgggaaacataactgcgtagaaaagcgcacggattggagtatcagcatggagttggatcaggaaaagcagaatcaggaggccgccgagcgctgccgtgcactggcacagcgcatcgtgcgggagctggctccccgcagcgtacaggtgctggaggacagcgggctgctggaaaaagctttttgtaaaatgaatactgcggtggtgcaaagcgccccggagctgctggtggtggcagacccccagtgggtcaccctgcccgccgtacaggcggaaaaggtggtgctggtgtgcgcagagtacgccggcatggcagactgcgcaaagcagcttgccgcgcagggcttctgccgggagcttgcgtggaaggaccgcggcaaggagcagctgaccgcgctgttctgccgcatggctgccccggagctgccggaacttgaggatggctacgagcagcagctggacgttctgcgggagcgcaccctgctggccgagcgcaccgcagccgagcagactgcccagctggagcggctgcgcagcgacctttccctgagccgcagccacgagcaggaattggaaaagaccctgaacagcgtggtcaactccaccttctggaaggccagctggccgctgcggtatctggtaagcaagtgccgccagctgtggcgcaccttcccgctgttcgtcttttttgccaccttgcgccgggtgggctttgcgggcgtaatggcacaggccaaggccaaaaaggagtacaaaaagctgttcccgggcaaggcgatgcccgccgaccgctttgcggacgtggagctgctggtaaaacaggccgcagaccagcctgctgcgccgtgcatcagcatcgtggtgccgctgtacaacaccccccacgattttctggtggagctgctggactcggtgcagaaccagacctaccgcaactgggagctgtgcatggtggatgccggacaggacgcggacgtgggtgccctcgtgcaggagcgtgcccgcaccgacagccgtatccgctaccggaaactggacagcaacgagggcattgcgggcaacaccaatcagggttttgcccttgccaccggtgactatatcgccctgctggaccatgacgacattttgcacccctgcgcactgtggtatgtggcggaagccatcgccaagcagggtgcggactttgtgtacaccgacgaagtgacctttgaaggggacatcgaccatctgacggtctaccacttcaagccggattatatgctggataacctgcgctccaacaactatatctgccacctgagcgtgttcagcgcggcgctgctggcaaaggtgggcggcaacgagcgggcagagttcaacggcagtcaggattacgacctctacctgcgcctgaccgagcaggcagaaaagatcgtgcacatcccgcatctgctctactactggcgttccagccccgccagcgtggccagcaacatctctgccaagacctattgtctggaagcagccatgaaggcgctgcgtgcccactacgaccgcatgggcgtgccggtggacgcggtgaccatggtgcccaacaccccgggcttctacaagaccgattacaccatcacaaagcccgggcgggtcagcgtgctgatccccagctgcgaccattcgggcgatttgcgggtgtgcgtggagtccatctaccgcaagaccacctacccggattttgaagtcatcatcatcgagaacaacagcaaggagcctgccaccttccgctgctacgagcagctgcaaaaggagcacccggacaccctgcatgtgctcacatggcagggcaccggcttcaattacagcgccctgaataactttggcgcgcgcgccgctaccggcgaatatctgctgctgctcaacaacgataccgaggtcatctcgccccgctggatggaggagatggtcatgtatgcccagcaggaccgtgtgggctgcgtgggcgcaaagttgctctacccggacaataccatccagcacgcgggcatcggcttcggcttcctgacgctggcggcgcacatgcacaagaacttccctgtggggcaccccggctatatgggacggctggtctatacacaggatgtgtacgccgtgaccgccgcctgcctgatggtgcgcaaggacgtgtacgagcaggtgaacgggctggacgagagctttgccgtggccttcaacgacgtggacttctgcgtgcgtgtgcgggaggcgggctacaccaacgtgttcaccccctttgcccagctgtaccactacgagagcaagagccgcgggctggacgaaagccctgccaagcgcaagcgctttgcctctgaggtggagcggttccagaagcggtgggcaaagcagctggctgcgggcgacccctgcatgaaccccaactttgacctgatgaaggaggacttcagctttgacatcaagccgctggagtgagccttccgccaacgataaaacgaaagggggaacgcagatggagctttcggcctgtatcgtggtgtataacggcgccggggaggccatcagggccgcccagacggtgctggactgcacccgccgctacccgctcacgctgtatcttgtggataacgccagcccggacggcagcggcgggcagctgaccgccgccgcaaaggacggcaccctgcgcaccgcccccgggcagacggtgcaggtgctctgccgactggagaacggcggcttcggcaccgggcacaacacggtgctctcgctgctgcacagccgggtgcactttatcctgaacccggacatccagctgaccgcagacaccctgagcgaccttgcggactggatggcggcgcaccccggcgtggtgatgacccgcccggggctgacctttccggacggcagaccccagcagctgccgctgcgccggtgcaacgtgcgcgccatggtctaccgtcagttgccctgtctgcgcttctgggcaaagtgcaacgaccgctacctgatggcagacaaggacctgacaaagcccaccgagatcgagttctgcaccggcagcttttcggcggtggacactgccgccttcaaggccgtgggcggctttgacgaggggtacttcatgtatgtggaggacgccgacctgacccagaagatgcgcacccggggcaaggcgtatctggtgccccagtacaccgccatccacgcatggcaccgtgcggcgcaccgcagcctgaagccctttctgtggcagctgcgcagcctgctgcgctacttttccaagtggggctttgcgtggtgagcggggaagaaaaaatagtgtttttgattcgcagaaagcggtgtgccgtcggcacaccgctttctgctgtttccacctcttgcattttgcgtactttcatagtaaaataaagtgtactgccatcgtcttttgcaaaaatgcggccatggcagacccaaaattgtttacagcggacgcagctccgctttgaattaagctgcacatctttttataagaaaaaaggagtgcacaagtatgaaaggcattattctcgccggcggtgccggcacacggctctatcccctgaccatggtcaccagcaagcagctgctgccggtctacgacaagccgatgatctactatccgctgtccacccttatgctggcgggcattcaggatatcctgatcatctctacccctaccgatacgccccgctttgaggcactgctgggcgatggcagccagtacggcatccatctgcagtataaggtgcagccctccccggacggtctggcacaggcctttattctgggcgaggagttcattggcgacgactgctgcgccatgatcctgggcgataacattttctacggcaacggcttctccaagctgctcaagagcgccgtggccaacgcagagaacaagggccgctgcaccgtgttcggctactatgtgcaggaccccgagcgctttggcatcgtggagttcgacaaggacggcaaggtgctcagcgtggaggaaaagccccagcatcccaagtccaactacgccatcaccggcctgtacttctacaacaaggaagtggtgcagatggcaaagcaggtaaagccctctgcccgcggcgagctggagatcaccaccctgaacgatatgtacctgaagcaggacgagctggatgtgcagctgctgggccgcggctttgcatggctggacaccggcacgatggaaagccttgtggaggctgccgactttgtgcacatgatcgagaagcgtcagggcatcaagatcagcgcaccggaggagatcgctttcaagtacggctggatcgaccgcgacaccttgctggaaagcgccgagcgctacggcaagagcccctacggccagcatctgaagaacgtggccgacggcaagctgcgctactaagcataaggaaaggcacattggtatgaaaatcattgtcacaggctgcaaggggcagctgggcacagagctgctcaagcagctgcaggagggccgcagcgagctgggccccatccccgaaaagctgctcaacgctacggtgatcccggtggatctgccggaactggatatctccaattacaggatggtggacgagttcgtgcggcgtaaccgcccggatatcatcatcaactgcgccgcctacaccaacgtggacgggtgcgaggtgcaccacgacgatgcctttaaggcaaacgcccttggcccccgcaatctggcgcaggctgccgaaaagaccggcgcacggctggtgcacgtttccaccgactatgtgttctccggccgggagaacggcggcatcccgcaggatgaagccaccctgcccgggcccatcagcgcctacggctccaccaagctcatgggcgaaaagtatgtggagcggttctgccaccgccacttcatcgtgcgcaccgcgtggctgtacagctactacggcaaaaacttcgttaagaccatcgtgaacgcaggcaaaaagttcggcaagctggaagtggtcaacgaccagtgcggcaaccccaccaacgctgccgaccttgcccacgagatcttgcagctgtgcgtgacccacgagtacggcctgtaccactgcaccggcgagggcatctgctcctggtacgattttgctgccgagatcatccgcctttccggtgtggacgctaccgttgccccctgcaccagcgaggagtacaaggcaaagcacccggacagcgccgaccgccccaagtggagcgcactggacaaccggatgctgcgctgcaccgtgggcaacgatgtccgcgactggaaggacgcgctggcctgcttcttcgcccactgggacggcgaaaacggcatgaagggctgaaaaaactgaaaatcccccctgcggaagaactgaggatgtatcatgtttgatgcgatttttggcagatctgtcaagatattaaagatccttgcaaaggtgcagtgtgtgctggcctttgtgcttgcatccatgctgtgcggcgcggtccatgaaatgctgaagcccatcagccagttttcagccatcgtgctggggctggtggtcgccgtggtgttctgggtcttgcagatgtttcttgcatgggcgctgtacgccttcgcggagctggtggagtacaccaaagagacccacaaggagctcagcaacatgagcgagggtctggcacggtacacccaagccacctatgaggagcttcacagcatgaataaagggctggaggcatacaccaaggccatgggcaagaccttgaacagcatgaacaagaacctctaccttgtggcaaagcactgctgcgccgaggaggaacgcgcccgcgccgcagcccgcccgcagtccgggaacaacaacaaataaataaagagggatactgacctatgaaaacctatctgatcaccggctgtgccggttttatcggttccaactttgtgcactatatgctcaaaaaatacccggagatcctgctggtcaatctggataagctgacctacgcaggcaatctggaaaacctgaaggacgtggagggcgacccccgccatgtgttcgtgcagggcgacatctgcgacaaggagctggtggagagcctgtttgcaaagtacgatttcgactacgtcatcaactttgccgccgaaagccatgtggaccgctccatcaagaaccccgaaatttttgtgcagagcaacgtgatgggcaccgtcaacctgctgcagcgcgccaaggaggcatggtacgacgccgatgccaagacttggaaagagggcaagaagtacctgcaggtgtccaccgatgaggtgtacggcgctctgggtgcagacggcttctttatggagaccacgcccctgtgcccccacagcccctactcctcctccaaggccagcgccgatatgttcgtcatggccttccacgacacctacggtatgccggtgaacatcacccgctgctccaacaactacggcccctaccagttcccggagaagctgatccccctgatgatcaacaacgtcaagcaccacaagcagctgcccgtctacggcgacggtatgcagatccgcgactggctgtatgtggaggatcactgcaaggccattgatatggtggcaaacggcggcaagatcggcgaggtgtacaacgtgggcggccacaacgagcgccccaacatcttcatcgtcaagaccatcatcaaccagctgcacgaccgtctgcaggacgagggcatcagcgaggacctcatcaagcatgtggccgaccgtctgggccacgaccgccgctacggcatcgaccccaccaagatcaagaacgatctgggctggtaccccgaaactccctttgaaaagggcatcgtgctgaccatcgactggtacctgaaccatcaggagtggatggaccacgtcaccagcggcgactaccagaactactatcaggatatgtacaagaataagtaacagcctgtaaatttaaactccctctgcatctcacggtgcagggggagttttttgctgtcattcccgttacgacccctccccgtgaaaatggaatagcggagcgtccgcagacgctccgctattccgaaattaaaaataatctttccgctgaacatggctagagcgtagcggaagccatttcaaatcgtcccgccttgggtggtctccaccacaaaatccgcgttttcggcaacgccgtactgcgcaaagtacccctcctccagcggcacccaccgggcggcaaaatccgcgtagcgtgcgccctcccgcgcctgtaagcgccgggtctgctcggccttggtgcaggtcacgaacacccgcagcgtctcgtaggggcgcagcagcgggtggtggctgtaactgccctctaagatcaccagcggctgcgcgggcagctgtgccgggggcagataagccccctcccggcagctgtacgcccggtaggctacgggctgccccgcgtaggcagggcgcagggcttcgtcccgcagacgggtaaggtccatgttggcgcagggggtgtgcgcccagtccgggctgcgccgggcgggcggcaggtagaaatcatccgtgcgcagcagggtgcagccgggcagctgcgccgccagtgcgttggcaagggtggtcttgccgctgccgcagcggccgtccagcgccagcaccagcgggcgggtgggcttttgcgccagcgcggcgctaagcagcgcagacagggtggacgcggtgatgggtgtgggcatgggtttggcctccttgcaggggtgcgccccaaggggcagacccgataataccccattatatcataaccgccgccggaagggtagcgcgggcatggtttgtcgtaaataacttttttgccggaagggcttgacacagcccgctgcggtgtggtacactactggcgttagaaacaactaaccatgtgagaccccaccggcagcgcccgcagaccgggtgtgctgcttcttttttgaggtggaggttagccacgtcttacttataacagcccggcatccggggcacactgaccctgacaccgccgccaaaggagaaccgccatggagcgtgattttgagaccgtaatgatcgaacaatgtgccccggtactggcggggctgaaacctgcgggactgttccgctacgaaacgcgaaaccgtgccgaccttgcccggcgggtggcgggctggaacgcccagctgaaccccaagggcttgcaggtgcgggtgctgcgggggtgcattgccacccggcagtatctggtgtacgtctaccgcgccgccaagctgcaaacggtgctggcagatgccgctgtgcgcggctttttagcccgggagggctaccgtctgccggaagatgctgcggactgcaacgcgctgctggaccagctcagcctgcggctgtgctgcgcggcggaggcggcggatttcccccacgagatcggggtatttctgggctatccgctggaggatgtggtgggctttatccgccaccggggcaagtgctttacctgctgcgggtgctggaagtcctacggcgaccccgccgccgcccagcagcactttgaccagctggccaagtgcacggcggtgtacctgcggctgttccacagcggcacgcccattttaaagctggcagtggccgcctgaaaaattgatattctcttttcaaatactctcttttatcctggcaactctcctatgcttccgacacaggagagcgtgatcctcctttttacacatgaccgcccggtgcagttttgacccctgcgccgggcggtcgtgtgtttgggggaatgcactcccgcgcggggtgggacgattttgaatgcgctccgcgttgctctgcgcataaatagcggaaagattatttttatttcgcaattctggaaaatctgcggattttccagaattgccttttcacgggaggagtcattctccgtcaccctgccctataaaatggcaaaacgaacccctgaaaatgtaaacattggctaactttaactcaagaaatagagttagtcattgatgattttgacaaaaatgcagggcgataccggcataaaatttgtttgttcatataaactaactatgaggtgtgaaaaatctattgacaagccgggttagcagaggtaaactatctacgctgatagttacggctgactaaccaccgcagcatcacatatttttcaagggaaggggagcacagcgatgatgcctttgacgatgacaaaagcaggcgagaccgtcaccatccgcaggatcagcggcaaggatgaggtgcggctgcatctggccgagctggggttcgtggttggcagcgaggtgaccgtggtcaacgagatcgcgggcaacctgatcgtgcaggtcaagcagagccggctggcactggataagaccatggcaagccgcatcatggtggactaaggcagcgccttcccggtgctgcatgagatactgcaagggaggaacgagtacgatgaaaacactgaaagacgtaaaggtgggcgagaccgccaccgtggcacggctgcacggcgaaggcccggtgaagcgccgcatcatggatatgggcatcaccaagggggtgcagatctatgtgcgcaaggtggcaccgctgggcgaccccatggagttgaccgtgcgcaactacgagctgagcgtgcgcaaggccgacgctgagatgatcgaagtggtctgatacgaccaaaagggaggaaaggtatccgcaatgagcattaaaattgcactggccggcaacccgaactgtggcaaaacgaccctgttcaacaacctgaccggctccaaccagtacgtgggcaactggcccggcgtgaccgtggaaaaaaaggaaggcaagctcaagggcgacaaggacgttgtcattcaggatctgcccggcatctactcgctgtccccctacacgctggaagaggtggtctcccgtacttaccttgtgaaggagaagcccgacgccatcctgaacatcatcgacggcaccaacatcgagcgcaacctctacctgaccacccagctgatcgagctgggcatcccggtggtcatggctgtgaacatgatcgatctggtgcgcaagaacggcgacaccatcgacctgaagaagctgagcgcagagctgggctgtcaggctgtggagatcagcgcactgaagggcgagggcaccgaggccgccgcaaaggctgcggtggcagctgccaaggccggcaagaccggcgagctgccccatgtgttcaccggcagtgtggagcacgccattgcccacatcgaagagtccattcagggcaaggtggatgaccgcttcctgcgctggtacgctgtcaagctcttcgagcgcgacgacaaggtgcaggatgagctgaagctggacaagaccctgatggatcacatcgacgagcacattcaggactgcgaaaaagagatggacgatgacgccgagagcatcatcaccaaccagcgctatgcctacatcaacaccgtggtgggcaaggctgtcaagaagaaggcccgcgtggagcacctgaccatctccgataaggtggaccgcatcgtgaccaaccgcgtgctggcactgcccatcttcgcactggtcatgatcctgatgtattcgttgtccatgggcacctccattgcagacggcggctggtccatcggcacctttgcaactgactggaccaatgatgtgctgttcggtgagatcgttcccaatgcgctgggcggctttttggagagcatcggcgtggcgggctggctgtacggcctgatcatggacggcatcgtggcaggcgtgggcgcagtgctgggctttgtgccccagatgctggtgctgttcttcctgctgtccattctggaggacgtgggctatatgtcccgcgtggcctttatcatggaccgtatcttccgcaagttcggcctttccggcaagagctttatcccggtgctggtgggcaccggctgcggcgtgccgggcgttatggcaagccgtaccatcgagaacgagcgtgaccgccgcatgaccatcatgaccacctgcttcatcccctgcggcgctaagatgcctattatcggcctgatcgcaggtgcactgttcggcggctctccgctggttgctgtttctgcttacttcatcggcatggctgccatcatctgctccggcatcatcctgaaaaagaccaaggcctttgccggtgaccccgctcccttcgttatggagctgcctgcttaccatgtgcctgcctggggcaacgtgttccgtgctacctgggagcgcggctggtccttcatcaagcgtgccggttccgtcattctgcttgcgaccgtcgtgctgtggttcctgcagggctttggcttcgagaacggtgcattcggcatggtcgaagatcaggacaactccgtgctggctgctatcgccaccaagatcgcatggatctttgcacctctgggctttggcaactggaaagcaaccgtcgcttccgtgtccggcctgatcgccaaggagaacgtggtgggcaccttcggcgtgctgtatcacttcggcggcgagctttccgagaacggcgacgagatctgggcagctgtggcacaggattacactgcactgtctgcttacgccttcatgatcttcaacctgctgtgcgccccctgctttgctgcaatgggtgccatcaagcgcgagatgaacaacggcaagtggacggcctttgccatcggctatatgtgcgcactggcctactgcgcagcgctggtggtgtatcagctgggcggccttatcaccggcgaggtgcactttggcctgttcaccgtggtggctgttgtggtgctggcagcgtttatctacctgatggtgcgccccaacaagtacgccgacaacaacgaagtaaagctggatacttcccgtatctgatagaaacgaaagggtgtatgctgtatgatggaatttattgcaacaaactttaatctgcccaccatcatcgtggcagcgctggtgttcggcgcgctgggctgggtcgtatggcacacccacaagcacggcggcggctgcagctgcggcggcgattgcagccactgcaagggctgccactaaacactgaaccgcaaggagcgcgggctgaaactctcggctcgcgctccttttttaagtgaaataaagttagcttatgataacaccgggcagaccccggcgcgtaaaaaggagagtgaccggtatgcagctgaccgcagcgcatctgcgctatctgctggccatctacgaggtaagccgcacccatctggacatcagctcccgcagcattgcggaaaagctgggggtgacaaaaccctcggtggtgcgcattttgaacctgctcatggagcagggcatgatcgtaaaggagtactacggtaaaatttacctgaccgaccgcggcatctgggtggcaaagcgggtgcagcaggagctggacgccattctggcgcacttcccgccggtgagcggggagctgacggacgaggagcagtggaacgccgcccttgccatgaccagcgccctgccccagcgcctttttaccgccgactatgagcggatggtggaagaggaggaggggggctgcgccgcaggcgggacgatttgaaatggcctccgcttgtgctttggccatcttcagcggaattaaagtttttattcgggattcagaaaagcctgcgggcttttctgaatccctttttcacgggagaggtcgtaacggtcaactgcatttacaattcagaccgccatttaacctttgcagtcccttctcgtgaaaatgcgtttggagcggcccgcaggccgcgacaaacgcgaaattataaataatttttcctctgatgatgcgcagagcaacgcggagcgcattttaaatcgtcccgcccccggaagggtgactcttcaaaagtcccctatgacccatagagttttgaagagtcatgaacaaaaagcaaagaaaactgcgttttcaggtcatgactcttcatcttgaagagtgagcttttaaacatagatgcgtttctttttcgtcactcttcaaaaatccaaagtagtaatagagttatgactcttcaagttttgaagagtcaccaactcgctgttcagcaggagagcttcagctgatggttcatgttcaggatatcggcacagacggcagcttcttccagctctgatctgtaccagtaagttttttgatcaggctgtttcccgatacgcagtaccttcaaatccagcgcgatgcgtgccctgcggatggtactgtccgagatatcccgctcggcgcacaggcggtacacctcgcccgcctctacccagcccacaaaggacagctgcttttccagcgcctcgatggcgttggcaagggcggcagaggggcggccattgccggtggcgggggtgcccgcctcccggatgatggcgtcggcggtaagggtgcagggaccgtcgtaggccaccgtgccctgcggacagatgcggtagcgctggctttcgccgggctggccaaggctgtttttggcatgcgccaccacccgcacctccgggtgctccgggtcccgcccggcgatgaggatgctgcgggcggcgttgcggaaatcgctggagccaagcagacggtccagcgcgctgcacaccccggggccgggcttgctcatgtggctgatgagcagcaccgccatgtccagctccttggcaagggcacccagatggtccagcagcgggcgcacctgctcggcgcggttcatctgcaccccctgccccagatagctctggatggggtcgaacaccagcagcgccgggcggtacacccggcacagggcggcaagctcctcgtcgcccatgctgtaactggcaccgtcctgaaaatacagccggtcaaggtctgcccccatggcctcggcgcggggacgcagcaccttgttggggtcgttctcggcggtaaggtagagcacggtggcggggggctgcggcggggtgtccggcgcaaaggccgcgccccgggtaagccgggcgcacacgtccagcgcaaggctggtcttgcccgcagcggacacgccgcccagaatgcttaccatgccccggggcaggtagggctgcaccagataggcggcgcgctccggcgcaaaggcgctggcgggacggatacggaaccgcccgcgcccggccttttgtttggcttcggcctcggcgcgctgctcctcggcaaggcctgcctgcacatactgctggcgggcgtttgccacaaagccctcgatatcctgccccatgcgcgccccgcagtcggtgaaccagctctccacccggccggtgtcccgcagctgacggctgtacagctgcccccgcagcagccgcagggcttcctcgcggcggtctttgtccagcgtatacaccagcgtggcggtgtaatcgctgagcaattgggcgtccggcgcgtgctccagatgctggcacagctccgtccacacctcgtgctggacggcctgcgccttgtcgtaggcggtacggtacttgtttgcgtccatgtaaaaaacctcctttggacataaagtatctacccttatcctaaggcgatggacgcggaaaaaccagtgtgtactttttgagggccagagggtattattgcacgctggatatacacgttgtaaatgcaagcgcagccgctgcaaaacaaaaataaacgcagcagcgcatggcagcgcccgccgcgcgggaaaactctgccaaaaactggcgaagtatttccccccgcgtaatgcaccgaaaacgtgcgatttttgggggagacagcaaatgccggacagcttgcaggctgcccggcattgtgcgttgtggttattttttgatcgcccgcaggatgcggttggcgatgtacttatgcccgctcacggtggggtgggcatcggtggcggtcatggcaaaggggatgggcacataggtcacattctcgttctgggcggcaaggttcttgctgagggcattcagccgccggaacagctgtgtccactccggcagcaggggcacagggttcgtgtagcccaaaaggatgatctgcgcgtccgggttcagcgcccgcagctccgctacgacctgcggcatatgcacggcggcttcctgatacgcctgctcgcagatggcgtccgtaccgccgcccagcagcagctgggtggtggcctgcttttcttcctttgtcagccgcaggcgggaaaggtcgctgttcagccgctgcaggttctcaaagctgggctcgcgcagcacgccgctgaccatggtggctaccagctgctcgctcttccagttggtggcgttgcccagcgccacaagggcgggcaccagcgcatcgttggagccgatctgcacgctgatgacatccgcgcgcttgaggtagtccagcatctgggggtagacgtagtaggtgcccgcctgctggttcatctggggcattgcgccggtgtgcagcatatccgcaaggtcgccggtggtcagcccgggcaggccaaggttgatggcgtgctggcggtccagcccaaggcctttgcccaccagcgaaacataacactgctccgggtagccctcgaagtttggggccgcgtctatgccgatggcggctgcagtgtacttgaaatccggcagacccacgccggaaacgatgctgtcgcccagcgccacataggtgcgttgaggatcggcggcaggggcttccgcagcgggctgggcagcttcctcagtggggacttccgcgtccggggcagctgcctcggcggtctgctcctgcgcggcgggggcggtctgttccggcggcagggcgtcgggctgctgggcaaaggcaggcacagccagcagcatcagcgcagcggcgctgcacagccatgcggtaaaacggggatgtttcatggatgattccttctttctcaagggcaggggagttaccctacctcttcttccagcttacggtagtcggccttaccggcgggggtcaggggcatttcggggatgatcttataggccgaggcggcgggctgcacatactccggcagctcctcaaggcacagctggcgcagctcccgcaggatctggcgctttttgccggtggcggcaggctccagcaccacaaagacgaagggcagccgtccctgggtgtggtcggtatcggcgtagcccaccacgcagcactggtgcacggcggggtggcggctgatgacgttttcgatcatggaggggaacaccttgaagccgtcgtgccggatgatgatgcgcttgatgcgggcatccagatacacaaagccgtcctcgtccatggagccgatatcgccggtgtgcgcccacagctggccgtcggcgtggcggcgcagcaggtaggcggtctcctcgggcttgttgtagtagcccttcatggcggtgggggtgcagatgcagatctcgccgcgctgaccgatgggcagctcggtctcggtgcccggctcgaagatggagaccaccgtgttgaccatggggatgcccacgctgccgggctttgtcacgttgccggcggcgatggtggcagccgaggatacctcggtcatgccgtagccctttgccagcgggtactccaccccgtgggctttgaggaaccggttcaccgtctgctccgcgcccagcgagagggaatcgcctccggcggcgtagttgcggatgaaggagaggtctttgtttttcagcagcgggtcggcggcaagctgctggtagtgggtgggcacgccgaacatgtgcgcgggcttgtacttccacaccagtgcgcccagcttttccgggtccagattggggatgatgatgatatgcagccccatgaccagcggcatgtggatgccgcagctgtaaccgtaggcgatgaagggcggcatgacgttcagcagcttctgcccgcggtggaacagacggctctgggcggcaaactcctgtgcaagggcgttgaagcagtagtcggtcagcataacgcccttgggcgagccggtggtgccgccggtgtgcaccaccacgcaggtgtgctgggggtcgtagggcgtggcggcggggctgtgccctttgcctgcggcgataaaagccttccagcgcagcacgttggaggcgtagcggtttttatccggctctgtcagcttgtagcccacggctttggccagcggcagactgtcggcggggctgagcaccaccacccgctccacgctggtgcgctttgcggcctgatggcagcgggggtacaccacgttcaggcagatcagcaggcgggactccacctcctggatgtactcccggatgccctcggcgctgtaccgggggtctaccagattcagggtagcgcccagcaggtcggcggcgtagaaggtgtagaccacctccggggtcatcacgctgaccaccgtgatgatatcgccctttttcacccccagcgcctgcagggcggcggcggtcttttttatctgcacgatcaggtcggcgtagctgaacttgcggccgtagtattccagcgcggtgtcgcccaggtgccgctcgttgttgcggcagaccagcgcaaaggccgagcactccggcacggattggtggatgtacttttcgtcataatatttcagccatggctttgccttggaggcgtagaccggctccttgccatcttccatcataggatcagacctttctttatcatcattcggagaccggctctccgagagcaggtgcagttacattggcaggggcagcgctctgcccggcggggatggtctccggcagggcggcagcggtctctgcggtctgggctgcggcctccacagtctcggcggtggcttccgcagcgttttccgctgccttggcggcttcctcagccgccttggcggcgcgctcggccttcagctgctcggcgcgctgacgcgcctcctcctgccgtttcagggtgcgcgccttgatgcggcacaccgagcacagaccctcggcgctgtccggggcaatgggcttgccgcactgcttgcacagggtcttggtgcacttgtgcagcaccacagggccaagggtggtcagctggtacagcttcatgccgtcaaagcccttgttggagcacacgttcatgcacacgccgcactcgctgcacttccacggggtaagcaccatgcgggtctggccattgggcatctcctcaaacttcaaagcgttggcgcggcaggctttctcgcaccggccgcagccaaagcagttgtcggtgaacttgggcatatagtagccgtactgcaggggcgtctccatggcggctttcagctgctttgtgcgctggtgcagcagcaggcggaagtccaccccgctgtcctcctcgctgcgcagaccgggcagcatctgcagcagctttttggtgccgctcttggagccgtggctcacctgttccagcatctcgcggcgggtcagctcctgcacatggtaggggtactccttttcctcatacgccagcgagaaccgcgcttcgaacatcggctgaccgaaaaagtccacaaggcgggtcagttccttacgcagctgctcggcgcacaggtcgttctcgcactgcccgcagggggtcaggtccagcacgatcttcttgttcagcgccagatacgccagcgcctcccacgagagggcgcagatgcagctgcgcaccacggtgttcttgcgggtggacttctcacagccgatccagatggtatcgttgtcggtgtcggccgcggcggtatcccgctgcacctgctccggcgagggcgcaatgcagccgctgcggcaggcggaaacgcacagtccgcagtcggtgcaggggtcccagtccttgacgaggttcgggcgggtaaagatctcctcgccgtaggggcagatgtccttgcaggtggtgcagggcttgcggtgagggtgcaaattccagcactggcggcggttgatctcgggatggctggtcttcatcagggcatccattgcagttctggtaaaaaagcccatggtcttactccttttccacaacagaggtaagggcagcgtggtcgagcaggaagcgctgcaccttctggttggtcacggcggcggcgatggcgtcccggctgagcaccttgcggatctcttcttccggggtgtcgtgcagcttggaaaggcgggcgatctcggcgtccacctcctgctgggtcacggtgatcttttcggcttcggcgatggcgcgcactgccagcatggcccgcagctggcgctcggcttccctgcggtagccctcccgcacctgctccggggtcagcccggcgctcttgcagtagagctccatggtcattttgctcttgcgcagccgctggcgcagctgggtcatctggtattcggcgttctgcgccagcagctctgcgggcagctccacggtcaggttcgcgcccgccatgtccagcagcgccgccccggcaatgcggtcggcgttggcctcgtgggaaaggcgctttttctcccgcaggctctcccgcagggtatcaaggtctgcaaagcccagcgattttgcaagggcatcgtccaccgggggcacctgcttgcgctccaccgtgtgcaggcagatctcaaactgtgccgtcctgccggaaagctccggcacccggaaatcggcggggtaggtgaaatcgaaccggaaagtctcgcccgcgcagtggccgtacacggcttcttctgcggcgggcatcagctgcccggtgcccagcactacggtcacggcttccatccggctgtccgggatgggcgcaccctccagaaaaccctcgaaatccagcgtgatgcgcatcccgcgggcggcgggcgcgtcagtgggcacaaagggcgcgtggacccgcgccagattgccgatatccgcctctacggccttatccgataccgggcgcacccggcgggtgaaggcaagccccttgtactgccccaaagtggcagcgggcatggtgtttgcagtttgttccatagtcgaacactcctttttacaaaagcggcgttacagcccgcgggcggccagccagctttctgcgatctgggagaacatctccgggtactgggcatcttcttctttaaaggcgctcagataatactccacctcggcgcgggtgggagccacggtgcgccgccagatggtaaaggtggtgccgttgcccatatcaaaggtggcctccagcgcaaagtactcgtcccgcaccgcaaggaacctctcgttcagcttgtgggacatctcgccgttgcccacaaaggtctgggggaaggggtcggcggtgaggacatatttggcctcgaagaactgcatggggaagttgtgggtgcccggcaccgagaagccgaaggccagcttatcgttgatgggggttgcgggcagctggcagttcttgaagtgatccgggcagtacagcatatcgtgggggatcatgtagctgatctcgccctcggcgcagtgggtgtcgatccagttggcaatggccttgatctgcggcagatccttgcggtcatagatcagcttgtccagccggacgaactcctcggtgactgccagcgggaagtgatccaccagaaagcccggcaaggcaatggtggtcaggggagagcagcgcaccgaggtggcaaacacgagggtgaacacccagaacacgacctttgccgcccggaagcggctgatgccctcggccagcgccgctgcgcccagcaaaaacaggagaaaccaccccgggaggaacagcagcatctggtgggagccggtgttctggatgcgggtgaacagcagcatgctcagcaggatctccagcccggcaaggcagggcagcgcaggcattttgcgctttttcaggctgaaccacagccccatgcccacgagcacaaggttcatcagacccatgcgccagaactgcaggctgatctcggctgcaaagccgccgccattatagtaggaatagcgctcggcgtagctgtaagcgaggatgcggctgaccatcggccacagcaggatgagcatggccaccatgctcatcaggccgaacagcacgaggttgcgcacctgcaaaagcgcctgctttttctgcccggcgcgggcagtgcgcgcgctgcttaccagcaccagcaccgcgtaggcaaagtagtagcccaccacaaaatataagtaccaccggcgggaaaggatgatggctgccgtggcggcaaacagcaggcagaagcgcaccggctccagcttttcaaaccggaagtccagcgtgagcagcagaatgctgaagccgaagatgaggccgaaccagtccggctggctgagcatggcgctcatgcgcagccacgggtaggtgaccatccaggtcatgccgatgaggaagtaccagaagcggtttttcacccgcagcatctgccccaccttgatggtaagccctgccagcagcaccagcagcatgggcaggatgctgaacacctgacagaaggcaaagctgtcgccggtgcggtcgctcaggcagaaaggaaactccagaaacagggtgatgaagttggtgtagtcctcggcaaaggagccgaagatgaactggaagcccgccgccgggccttgcagaaaggcagcttcggcccagtactgtttgttgatatagttgacgtagtcccagatatacacaaagctgcggcggccaagcgcccagaaaaagtagaccagcgccgccgcccacaggccgatgagcaccgccttgtggaagaggtcaaatttgattcccgccacccgcagcaccagcagcacacaggcaaacagggcaaggttgcaccacaggctcaccagcgggaaaaagaacttgctgccgggcgcagccagcgcaaaaacggccagcagcaccgctgctgccgccagcaccagcgcagttttcgccgcagcggaaacgcggggcttcgtaatgggttcggacatggaataggaccctccttgcaaaatttcacaccttacagtataacaactccccatggcactgtccagcaccccggcggtgaaaaatgcagaatgtcccgccgctttcaaagcagacgggacatttttgcataaatattacttatcggaaacttccgcagcggccttagcagcctttgccgccttgcgcttttgcgccagcgccctgttggcgctcaggcgggcggcgtccgggttcggggcttccggggcaagccgcagcagatagctgcccatggcgggcaggtccagcgtcagggtgtagtcccggccgaacacaccgccgtcggtggtgtggaagctctgcttgcggtgcgccttgtgcacgccgccccaagtgccggcctcggtgtccagcaccagctctgcgctgcaggggaacttgaggtacagggggaactttttatgggcgtggtcctgcgtgttcatcacgcagagcaggttctgcccgcgccccttgcgcagccatgcgtacacgccctcggcgcagctttcgtttgccacccactcaaagcagtccgggttgtactcgccatcgtagagggcgggctcggaggcgtagatgcggctcagagcggcaaagtacttctggaacgcatcgtggaaggggtattccagcagattccagtccagctcccgcttttcgtcccactcccggaagtgtgccagctcgttgcccataaagttcagctttttgccgggatgggtgtacatataaaaatacagggtgcgcagctgggcgcatttttccgcgtagctgccccacagcttgtcaatgatggtctttttgccgtgcaccacctcatcgtggctcagcgccagcagatacagctcgttgtagaagtagtgcatactgaacagcagcttgccgtagcagcccgggcgctcgccgaagggggtggcaaagtagtccagcgtgtcgtgcatccagcccatgtcccacttgtagtcaaagcccacgccctcgtagcgggtgggggcggtcacctttaagaagttggtggaatcctccgccatgtagatgccggtgggccagcgctcgttcagcccgtggttcaaactgcgcaaaaagttcaccgcgccctgatttacgccgcggttggggtcgccctgccagtacagggcgcgggagatggcgtccatgcggatgccgtcgcagtggtacacgtccatccacagcccggcggcgctgctcagaaagctgcacacctcccggcggtagtagttgaagttgcaggtgccccactcgctctgtcccacgtcgctgtcgtactcgtacaggtaggtgccgtcaaactttgccagtgcgtcggcattggcggcaaagtgcaccggcacaaagtccatgatgacgccgatgcccatgcggtggcaggcgttgacaaagcccgcgaactgggcgggggtgccgtagcggctggtcaccgagaagtagccggtggtctggtagccccagctgccgtcaaaggggtgctctgccagcggcagcagctccacatgggtaaagtggtgctccagcagccacgggatcagctcccgcgccagctcctcgtagttataccacccgtccgagccgtccggctgggttgcgccgggcttatgcttccagctgccggcgtgcagctcgtagatgttcagcgggcggttgcggcatttgtcccgccgctccatccacgcggtgtcgtcaaaggtgaaatccagctttgtcagcttgctggcggtgccggggcgcagctcggtggcaaaggcgtaggggtcgctgcgcatcacggtgctgccgtccgcgccatgcacgcggtatttgtacagatctccttccgcaaggccggggataaaggcgctccacacgccggtatcggctttttccatgggtacgccgcgctcccagccgtcaaagccgccgcacacctccacggcggtggcaccgggtgcccacacggcaaaacgccagccctcggcgccgtttgggtcggtgcaggggtgcgcacccagaatgcggtaggcatcgaagcagtcgccactgaaaaacgtgcgggggatcacagggtaattcatgcaaagatctccttacttctctatgttgaccggcgatgtgcgccggttgatacaaggctgtttgggcaaactatccaagaaaaacgcctttttaccggcacagtagccgataatcttagcgaatcttgacaaaaatcggcaaaaatacacatatttgccagagggtgtggtatactgttgctaccgccttgcgggcggtgcaactttttagagcaatagaatgggagcgaacgatcatggcttggtatgacgaagcagtattttatcacatctatccgctggggctgtgcggctgtgcgcacgaaaatgacggccagcccaccccgggcgcttttgcaaagctggaagcatgggcagcccacgcggcaaagctgggctgtacagccatctacatcggcccgctgttcgagagcggctcccacggttatgataccatcgactaccgtctggtggaccgccgccttggcaccaacgaggagttcaaggcttttgtggcggcctgccacgcccgcgggcagcgggtcatcgtggacggcgtgttcaaccatgtgggccgcgatttcttcgcgttccaggacctgaaggcaaaccgcgagaacgcccgctataaggactggttctgcgatgtgaacttctggggcaacaacgagtataacgatggcttttcctacggcaactggggcggctacaacctgctggtcaagctgaaccagcgcaacccggaggtgcagcagtaccattatgataccgtccgcttctgggtggagcagttcgacatcgacggcatccgtctggacgcagccgatgtgctggatttcgacttcatgcgcgggctgcgccgtctggcaaacgaggtaaagccggagttctggctgatgggcgaggtcatccatggcgattacagccgctgggcaaacccggaaatgctgcactcggtcaccaattacgagctgcacaagggcctgtggagcggccacaacgaccacaactattttgaaattgcccacaccatgcgccggctgcaggggctgtgccacgacacccggctgtatctcttctcggataaccacgacgtggagcgcctgcccaacaagctgcgcaaccgggagcacatccggcacatcgccattctggtgtacagcctgtggggcatcccgtccatctactacggctcagagttcggcatcgagggcaaaaaggagtggggcagcgactggccgctgcgcccctgtctggagctcagtgactacgctgatgcagaacgtacaaatcctgttaccagtgtatacaaagcgctggggaaatgcaaggctgaattgccggaaatgacctacggcgaggtaaaggaattgcagctcaccacccagtgctacgcctttgcccgggtgctggacggcaaggcggtggtggcggtgctgaacaacggcgatacccccgcacagctggaattccagctgccggtggaaaccgccaaggtcaccgacctgctggcggacaccgtgggtgcgcaggaggtgctggtctctaccgagtgggaccgcatgaaggtgcagctgccctccaattacgccaccctgctgagattggaataaagcaacgcctgcggcgtgaccggcgcaaaagcctttaccctttggagataggtttcccccgtccgggggaagcctttgttcagaaagctgagattggaataatcttgcacattttgccgcgttttgctacaataaggagagaaaagtcgttttacggaaaggaagcctgaacccctatgaatgcagcacagcgcagagaacgcatcctgacccggctgaacagcgccggtgcccctttaagcgccagcacgctggcggcagagctgggggtgtcgcggcagatcgtggtaggggatgtggcgctgctgcgtgccggcggggcacagatcgatgccaccccccggggctaccagctgcacccggcagaaaagggctataccggcattctggcctgtgtgcaccgcacgcaggaggagatgcgccgggagctgtacaccgtggtggatcagggcggcacggtggtggatgtggcggtggaaaacagcctgtacggcgagatccgtgccacattgaacctgtgcaaccggtacgacgtggataactttatccgtcaggcagcggatgcacccgagagccttttgagccgcatgaccggcggcgtgcacctgcacaccctgcgctgcccggacaaggacacctttgcccgcatccgcacggctttggagcagcaggggcttttgtaccgcaaggagtaacgccgctccgcttatacccagtataaaaagggctgcggggcttgtctatccgcaaaaccggaaaaatgttggaaaatcaacaaaaatgcaaaagaggtgggttttctggatatccgcattgaaaagaccgagcgcgccatcaagcaggcctttatggagctgcgccgcgaaaagccggtggaaaagatccgtgtcaaggagctgtgcgaccgtgcctgcatcaataaatccacattctacgcccattatcaggatatctatgcgctggccaacgccatggaggacgagatggtgcacgcggtggtggaaagcctgccccgcctgaccgccagcgatgtgagcgagcgcaccgagtggcttgcgcgggagatgttccgcgccttcaccgcgcatcaggccgagatcagcgtgctgttctccggctcccggcaggggctgttcatcaaccgggtggaacaggccatgtgccagtgcatcgcccagaccgaccccacctttgagacggacgtagtgcgcaaggtggtgctttccttctgcgtgcaggggtgctactacacctttaccacctactgcggccagatggacgaaaagcgccttgtgaccctgctggcctccatcgcccgcgccgcgcagcggatacgcatgtaacgcgggacgatcaaaaatggccgccgcttgtgctttggccatctttagaggaataattatttttacttcgggatagcggagcgtctgcggacgctccgctatcccatttttataggggatgcgtgcttttggcataactgccaaaaaataagacgaaaattcgtcatctgcacttttttaccatatttcttaagaaagagtttacactatgccggaaacggtggtattatataaaatagtatggtatggggtaaaatgcgcctgcgtactccgggagggcatgggatgaaggacaagatctcgcgccgcagctttctggcggcggctgcggtctcggcaccggcaccgaggccgagatcaacggcgcagtcaactttttaaagtggttcaccgagccgcagaataacatcgctttcgcggtggagtcgggctatctgccggtgaccaccgccgccaacgacatggacgccatccgcgcaagcgggctggaactgaccgacgactattttgaggcgtggtatcaggccactcttgcacagttacagcagtacgagggctgaacgcccgcaaaaaagacggaaaggaggcagggcgatgtttgacgcatggaaacagcgccagcggcagcgcttggaaaacagaccggaaagaaccgtgttctacaatatttttgccaccatgatgctggtgctggcggtggagctgctgatggcggccgccagcatccttgccgtcaacgtgaccgggcagctggacgaaaacgccaaggatctgcttaccatgcgggtgcgcaaccgtgccagctatgtgcaggagatcctgcggaacgcggaggatctggagcagctgagcgagcagatcaccgccaccacccagcagctgctgaaaagcggcgatatctcgctggacacgctggataacagcagcgaacagagcgatgctttgctggtagcgcttgccccgcagcttctggacaccctgcgcacaaagcaggtgaccggcatctttctcatgctgaacacccatgatctggacacctgcgaggtgggcaaaaaaatgcccggcatctacctgcgggatctggacccggacgcccgcccttcggagcgcaacagcgaccttttgctggaacgcgccagcgccacagtggtaaaagagctggccatcggcacggataagggctggcagcccgctttcccctatcagggagataccaagggcggcatcctgcgcacggtgtttcagaccgcgtataagagcggcgccggcctttcggcggaaagctatggccgctggaccaccaactcctattgtctggccggggacgaccggcacgccattgcctactccatgccgctgatcctgccggacggcacggtatacggcgtggtgggcgtggaactgctcacggactatctgcaaacaaagctgcccttcaccgagctggacgaggacaaggcaggcacctattttatcgtgaccactaccgatgatgcgctgacggacggcgtgctctccctgcgcaagaccgtgacctccggcgaggatctggtaacggcagatgcaccgctgggcgttttgaactgccgcagcaacggcaacggcggcaactgggtggagctgaacgataagcgctattatatggtgctggagccgctgcaggtgtataaccgcaacgcgccctttgccgccgaaaagtggtttctggccggtaccatggaacagtcggtgctgctggctttttccagccgggtgcgcgaggtgctgctggctaccatactgctcacgctggtgctgagcgttttgggcagcctgctggtctcggcgcggctggccagacccatcaaccgtttgtaccgcgaggtgatagacgcgcaggagaaaaagaccttcccccgcctgacccgcaccgccatccgggaggtggaccgctttgccgagaccattaccgagctgaacaaggagctggtgaccaactccaccaagtttttgcgcatcatggatatggccagtgtggagatcggcggctacgagctgcgcaccgacaccggcagcgtgtttgtgaccgataatttcttctccctgctgggcaagcccgagatgcagggcaagccgctgagcgtgcgccggttcgaggaggtgctcaagggcatccgggaaaagaatccctgtgaccacaccgccgagggcgacgagcttttgaccatccagcagccggacggcgtgcggtacatcatgctgcgcagcaccatcgaggggcacgccaagatcggccttgccgaggacgtgaccgccgccgtgctggagcggaagcgcatcgagcacgagcgcgatcacgatatcctgaccgggctgtacaaccggcaggccttcaaccgggtgtgcaccgagctgtttgccgcgccggagcgcatgggcgtggcggcgctgatgatgatggacctggataacctcaagcacatcaacgatacctacggccacgactggggcgaccagtacatccgccgcaccggtcagtgcctgcgggacaatacccccgccgggacggtgtgcgcccgcctttccggcgacgagttccttgtgctgttccacggctaccgcagccgggacgcagtgcgggaaaagatcgaccgcctgacgaaggccatgcagcagagcgtggcgctgctgcccagcggcaacgctttgcacatcagcctttccggcggtattgcgtggtacccggacgacgggcaggactgggagaccttgaaaaaatacgccgactttgccatgtatcaggtcaagcattcggagaagggccgggtggaggagttcgacatcggggtgtacaaccgcgaagcctacgccgagcgcacccgcagggagttccggcagctgctcagcaatgcacaggtgttctactgcttccagcccatcttctcggcacgcagcggcagggtagtcgcctacgaggcgctgatgcgctccgacctgcccaccctgcgctccccggccaccatcatgaagctggcgcgggagcagggggcactgtacgagatcgagcgcctcacctttaccaaggcgctggagaccttcgacagcctgtgccgggcgggcagcgtgtccgaggaggctatgctctttgtcaactccatcgccaacacctgcctgtcgcatgaggacggcaaatatataaacagccattggcacgagctgtgccgccgcatggtcgtcgagatcaccgaagaggaagaaatcgactacgaagcactggagagaaagcgcaatgcaccgggcttttccgggatgtttgcactggacgattacggcagcggctattccaacgagaatacgctattgcagcttgcaccccggttcgtcaaggtggatattaccatcatccgtggcatcgacacctcgccggacaagcagcagatcctgcgcaatatggtggcttacgcccacccccgcagcatgaagatcgttgccgagggcgtggagaccgccgccgagctgcgcacggtcatcgagctgggcgcagaccttttgcagggctattttctggcacgcccggccattgtgccgggagcaatcgcgccggaagcagcggggatcatccaggagttgcagcgccggaaaaaagactgaaatatatgccctcccgggcgctgcggcgctgggagggcttttgcaacggaggtagaaaaatatggttcaggtggatctcatcaccggctttttgggcgcaggcaagaccacctttctgcgccgctatgtgcggtatctggtacagcagggacataaggtgtgtattctggaaaacgactttggcgcggtgaacgtggacgccatgctggtgcaggaggtgctgggccccggctgcgatgtggagactatcagcggcggctgcgactgcgacacccaccagcgccggatgcgcaccaaactcatcgccatggccatgcgcggctttgaccgggtggtggtggagcccagcggcatctttgatgtggacgagtttttcgatatcctgcgggacgacccgctggaccggtggtatcagctgggcagcgtcatcgccattgtggacgcccttctgccggaaacgctttcgccgcaggcagagtatctgctggcgtccgagaccatgaacgcgggctgcgtgctgctgagccgtgcccagctggcagcgcccgcccagtgcgccgccgccgctgcccacttggagcgtgcactggaaaccgcaaaatcttcccgccgctttgcgccgggggagatccttgccaaggactgggacgccctgaccgatgccgaccttgctgcccttgccgcctgcggctaccggcaggccagctgcgaaaagctgcattttgaccagcacgcggcctttacctccctttgctttctggaactgcacctcaccccgcagcagctgcaagctgccgcacagcggctgttcgcagcgcccgagtgcgggcaggtgctgcgggtaaagggctttgcgcccgccccggcaggcggctggctggagctgaacgccaccgccgccggctgcacccttgcgcccatcccgcaggggcaggaggtagtcatcgtcatcggcgaggcactggataaagccgccattgaagcaaacctgaaggggtgaaacgcagtttccccccataacaaaacacattgtggaaaaacaggagggactatcatgcaggaagtacgcgcagccgttatcggtacaggggtcatggggcgcaagtatgcccagatgatcgcagaaggaaaggcgggcgcattgcgcctgaccgccgtggtctgccgcagcgccggggcgcagcagtgggcaaaggataccctgccggatacggtgcgggtgtgccccagcgccgaccagctgtacgattatgcagaagagtttgacgccgtgctggtggtcaccccgcacaagacccacccggcgctggtgatgcaggcttttgcccacggcaagcacgttctgtgcgacaagcccagcgcaaacgcgctggcaccggcactggaaatgaaccgcgccgccgaaaaaagcggccttgtttttgccatgatgttccatcagcgccgctacaaaaagtatatgcggcttaaaaaattactggatgatggggcattgggcgagatcaagcgggtgcagctggaaaacagccgctacttccgcacatggatgtaccaccgctccggcagctggcgttccagctgggcaggggagggcggcggtgcgctgctcaatcagggccagcacattctggacatctggcagtggctgttcgggatgccaactagtatttatgccgtgataccctacgggaagtataacgatttcatggtggacgacgaagccaccctgctcatggagtacccgcagcagcgcacggcaacctttatcctctccaccggcgagggcagctacaccgagcggttggagatcgtgggcaccaagggcaccgccctgctggaaaaggacactctcaccctgcacacctacacgccggacaccgagacctaccgccgcactgccgattgcaccgagcgccagcagcttaccgagaccaccaccaccgagcagttcgtgccgcaggcagagccttacccggagatgctggcaaactttgcggacgccatcctgcacggcacgcccctgaccgcccccggcgtggagggcgtgcgggcgctggaactgaccgatgcggcttacctgtccgcatggctgggggagaagatcaccctgccgctggacgcagaccgatttgaacaagagctgcaaaaacatattcaggaggaacagacaaatggctaagctgcggtttgtagtggtaggttccggctggcggtcgctgttttactggcgcatcgcgcaggcgctgccggagcggttcgagctgtgcgccatgctttgccgcaccgaggaaaaggccgaaaaaatgcaccgggagtacggcgtgccggtaagcacctcggcggagcagtgcattgccctgcacccggatttcgtggtggtggcggtgaataaagcgtccatcgccgccgtcagcaccgaatggcttgcccggggctttgccgtgctgtgcgagaccccggcggcgctggaggaggacgcattgcgcgccctctggcagctgcaccggcagggcgcaaagctgcaggttgcagaacagtactggctgtaccccacgctggcaaaacggctggcggcagtgcgcagcggcgcactgggcacgccgcagtttgtccggctgtcggtggcacacggctaccacgcggtcagtctggcgcggcagttcctgaacgccggacagcagccggtgcgggtgaccggacgcagctggacggaaaagatcatcgaaacggattcccgctggggtgcggtgcataacggcgcactggtggaaaagacgttgcagcagcacacgctggaatttgcgggcggcggcacagcgtttctggattttaacggtgtgcagtaccactcttacctgcgcagcacccacaccagtgtgcagggagagcggggcgaagtgttcgacgacaccctgcgctgtctggatgccgccggggagccggtgtgccgtctgttgaccccgctgcccgacccgctggcagctgccgccgcgcaggcggggctgaacgaggacgagaccgccatcgcctgttttctggacaggatgcagggctatcttgccggcggggcagaggtgtatccgctggcagacgccttgcaggacgcctaccttgccctgctgatggagcgttcccttgccgccggacagccgctggaaagcaccccgcagccgtggaatacagaagaaagataaaaaaggctcaggagcacctgtcggcgcttctgagcctcttgatttataatgcttggatcacatcaggtcgatcagcgcttccacctcgtccatgcgggtagcccagctggtggcgatgcgcaccacggtgtgggtgtcgtcgaacttctcccagaagccgaactttgccttgccttccagcgcagccagctgggtgttttccagcacaaggaagatctggttggtgggggagtccataaagaagcgatagccctttgccgcaaacccggccttcaggcgattggcggtggcaatagcgtttttgctgatggagaaatacaggccatcggtgaacagcacgtcaaactggatgcccagcagccgcccctttgccagcagtgcgccctgctgcttgaccatggtcataaaatgcgccggtgcgccgtgggggaacaccacagcctcgccgcacagcgcacccaccttggtgccgccgatgtagaacacatcggtcagccgggcaaggtcggccagcgtcacgtccgtgccctcggcagccagaccgtagcccagccgtgcaccatcgaggaacagcggcatcttgtactcctgacacacagcgtgcagggcttccagctccgccttggtgtacagggtgccgtactcggtggggtgagagatgtacaccatgccggggaacaccatgtggtcgtggttatcgtcggcgtagaaggtggccaccagtgcccgcagctcggcagcgtccagcttgccgttgtgctggggcagggtgatgaccttgtggccggtatactcgatggcacctgcctcgtgcccggctacatggccggtggcagcagccactacgccctgccaccgctgcagcatggacgcgatgacgatggcgttgctctgggtgccgccggagatgaactgcacatcggcctccgggcaggcgcaggcggcgcggatcttctcgcgggcgctggcgcagtaggggtcggtgccgtagccggagaccttttcaaagttggtctcggtcagcttttgcagaatggcgggatgtgcaccctcgcagtagtcgttttcaaaatacagcatggcaaaacgctcctctatataattgtaagaaaacagtacctctattctacatcgccgcgaaaaccctgtcaaatccaaaaccgtgcacagcgcacgcaaggcaccgcaaaaacgcctgcacagcgcagtcgcgctgtctgcaaaaaatgcgaaagtatgatcctttccaaaaagatgaaaagtttttcaaaaaagtgcttgacaattctgctgcatctggtataataactatcgttcccggcgccacggcgcaggaacacaacagaatatgcggatatggcggaattggcagacgcgttagattcaggttctaatcggggcaactcggtggaggttcaagtcctcttatccgcaccaaacaatgaaaatccgaaccttttctcgataggagaagggttcggattttttgttttcttcggaaagcagaacgaaggctctttccaaacggctgtgtgtccgaaaccttatcagaaaaaagaccgtatcacaaaggtcacaactgtaaaggtgccgtaaggcagaaaggacacaaacatgaagtacgatgaaagagcctgcaagttcaacatggacaccggctgcgtggaactgctgctccgggatgggagaatgatctccatcaactgcaccggggtcgaggatgcactggacgtgaccatggcgcagaggtcagaactggattatctcatctacaatgacccactgggctatgccgatttgatcctgaatggtgacccggaggaatatttgaaaaacgtaaccgggagccatgggttagaagattaagagaaatgccgttccaaaagcaactggaacggcatttcttatctttcgctattcggcatcttctgtccccgaagctcctgccggatggcacggaactgctccggcacatccgcatcggtcattgcaccggggatatccactgtcccagcggctttggcggcttcatagaaccagcatttatactccacggtctccagcgtgtgctgtaactgctggatttgctgggtgagcacctcgcgctgatgccggaacatttccagccgggtgtcaatggtgtcgtctccctgcatggaaagctcaatatactgccggatatccttgatggacattccggcttttttcatgcagcggatgacctgcagccactcgaagtcgttttcccggaacatccgaatgccgccggaggaacgctccacaaagggaagtaacccttctttgtcgtagtagcgcagggtggaggcaggtacgcccagcttttgtgccatttcacctacggtatagatcatctgaaacctccgttttttcaaaaagcccttgacttaaagtgcgctttaagttgtatgataaaatcaaactttatcaacatcataatgcggatgcactccgctgtcaaggaggttcctatgagcaagaaggtattgattttgtctggcagtccccggaagggcggtaactctgatattctatgcgatgaatttctgcgtggagcgcaggatgccgggcacaaagtagaaaagatccgggtcgctgagaaaaaggtggctccctgttccggctgctactactgcagcacccacggcggagcctgcgtccacaaggatgatatggcagacattctgcaaaagatgatcgatgccgatgtcattgtgctggcaagcccggtatacttctactccatcagtgcccagttgaaggcagtgatcgaccgtaccgtggcacggtggcttgaggtcaaagacaaggaattctactacatcaccaccatggcagacgaggaaaaagcctctgcagatactacgctggcctgcttccggggctatgcagactgtgtggaaggtgctgtggaaaagggtgtccttgtagcgggtggtgtctatgagccgggtgcagtgtgcggtacgcctgccatggcacaggcttacgagatgggaaaaaatgtataaatggagggaaatcagatgattttacaggaaacctacaaactggaaaatggaacgaaaatccccaaactggggcttggcacatggtgcattgacaatgacaaggcggcgcagacagtccgcaccgctgttacgctggggtatcgtctcattgatactgcacaggcctacaaaaatgagcagggcgttggcgagggaatccgtagctgcagcgtttcccgtgaggagctgtttgtcgcaagcaaagtggccgcagaactgaaaacctatgaggctgcagccgcctctattgaggaaacgctggaaaaaatggggctggactatctggatcagatgatcatccatgcaccccagccgtggaacgaattcagggacaccaaacgctactttgcagagaacaaagccgtctggcgtgcactggaggatgcgcaggcggctggcaaggtgcgggtcatcggggtgtcgaattttctgcaggatgacttggagaacctgctgtccgattgccggatacagcccatggtgaaccaaatcttgctccacatcagcaacaccgatcatgatctgctgaatttctgcagagagcagcacattcaggtggaggcctattcgcccattgcccacggcgaggcgcttaagaaccctgtgattgcacagatggcaaagaaatacggcgtatctgcggcacagttgtgtgtccgctatgttcttcagcttggcgcagtagcactgcccaaaacggcagacccacagcacatggaagagaatgccgccgtagattttgtcctcactccggaagatatggctgcactcatgcagatggagcacattgctgactacggagaattcagctctttcccggtgttcagcgggaaaaagcaggtctaagcgtttacacggaaaggcaggggtacaacaatggcagtgaaacagacagcagggcgggatgctctgggcgaatttgcgccaaaatttgcagaacttaacgatgaggtactattcgggcaggtgtggagccgagaggataaactttccctccgggaccgcagccttgtgacggtggtggcactgatggcgcagggactgacggactcctcgtttcggtatcacctgacggcagcgaaaaacaacggtattacccggactgagattgcagagatcctgacccatgcggcattttatgcaggttggcccaaggcgtgggcggctttccgcatggccaaggaagtctgggcagaggaatctgcagaggatgccaaggcaaagcaccagagtgaaatggtgttccccatcggtgcatccaacgacggttttgcacaatatttcagcggaaaaagctatctggcacccttgtccaccgtacaggttggcatttacaacgtcacctttgagccgggctgccggaacaactggcacatccaccatgctgcaaagggcggtggacagatccttgtctgcgtggcaggccggggctactatcaggaatggggcaaagcaccgcaggagctgcatccgggcgatgtggtgaacattcccccggaggtcaaacactggcacggtgctgcacccgattgctggttctctcatctggcagtggaagtgcccggtgagggcacctctaacgagtggtgcgagccggtgccggaagaaacctataaggagttgcggtggtgcgttttgacgtacacccaaccatgatgaaacaaaaacagggtgcgccccgaatggacgcaccctgccaaaagccacagacaatagcgatatgtacaacagggctttccccgtagcagagttcccataaaacagtatttgcaaaagctcctgaaatggggaagatttggcgtgacttcggtcacgccttttcttttgcttccagttcatccagagggatgtaccccagcccatgcgccagcccgattccatcccaaggaaaactgcattttccttgcgctgctttgcagctatccttttgcggctcccgcctgagaccgaagcgcacagcactccgctccaaggcggcgagcaaaaccgaatacgattccagaccgttcatcaagagcaatcttgctgggcggtctttttgtttgggggtgatgcctattccgtgtccgcatttcaaaatcaccatcgtcaagcgcagccaagggcagtccgctgttgccggggccgcttaccagagcggcgaacggctgttcagcgagtacgaccagaaaacgaaattctacaacaagaagaaagaacttgtccacgctgagatcatgctgccgtcccatgcgccacccggatatgcagaccgggcaacgctttggaacgccgtggaagctgtagagaatccagaaacaaccgcccgtcgtcgtaaatgtccttggccggtttgtggtgttccagcatggcgaacatggctttgattttccgctgcaaggccccaatcacaaagggctttgtgatgtagtccaccgcgcccacctcataaccccgtatctggtcgctctcctgatcgttggcggtcaggaatattacgatggtgtccgggtgctgaggctttattagcttgcacagctcaaagccgttcccgtccggcaggttgatgtccagcagcactaaatcaaattcccgctggcggatggcgtcggctgcggttctggcatttagggcagaagtcacgccatagccgtctgcggtcaggttataggccaccatcttattcaaaaaactgtcgtcctcgacaattaaaatctgcttcatatcctcacttcctttgctttttgcagatagtataacaggcaaatgtccgcgaaatgttacagcggacggatttttcaaaaaagggtttcttccttattataggatagcccactttacaatacaatgctcaaactatgaacaataaagtttagcaacaatgcgctttgcatcatttcgccaatcgtccatgaactataaaatgtatatgggtgatgcagaatggcgaaaatcgaggactgtcccggctttgaaacgttcggagcggatgtcaaggcagcacgaaaggcaaaacagctttcccgcagtgcgctggctgacatgatacattgtgacagccggtatcttgcgaatattgagaacgaaggcacgctgcccagcctgccggtggtgattcagcttattaaaatctgtggtctgcccgtggagcggtacttcaacccggaactcatgcgggaagaaagtgcggaacgtcagcgggtcagccacaagctgcagctttgcccggaagaatacttacccatcgtagaaggtgccattgacggtgccttacgaatccatgaacaggaaaaagagcccgtgtgtgtctgattgtcatgcacggtcattgagaggatgcaaaagcgtcctcttatttttttgcattttgcgggcaaaacgggggtgttgtggtgtcatagtagtggggaaaggtaacgtagcaagcatagggagtgtagccactcccggcagaaatgcttgctggggagtaccccagacccccaagaaacgaggtgaaactaagacgaaccgaacccgaaaaattgttctgcgtgttcccgtgacgccggaggaacgggaacttatccggcagaagatggctctgctgcacacacggaatttttctgcatacgcccggaagatgctgatagacggatatgttgtccacatcgacaccaccgacatccgggcgcaaaccgccgaactgcaaaagattggtgtcaacgtcaatcagatcgcgcggcggctgaacagcatggggccgctgtacacacaagacgttgcggacatcaagggagcattggcgcagatatggcagttacaaagatacatcctatcaagtcaacgctgaaaaaggcattggactacatcgagaatccagccaagacggatgaaaaaatgttggtgtcctcctttgcctgtgcctacgaaaccgcagacatcgaatttgaactgctgctctcacaggccatgcagaaaggcaacaatctggcccaccacctgatacagtcttttgcgccggatgaaaccacgccggagcaggcccacgagattggtcgacagcttgcagatgaagtcctgcaaggaaaatatccctatgtactgaccacgcacattgacaaggggcacgtccacaaccacatcattttctgtgctgtggacatggtgaaccagcggaagtatgtttccaaccggcggagctatgcttacatccggcgcaccagtgaccgactttgcaaggaacacggcctgtccgtggtaatgcccggccaagacagaggcaagagctatgccgagtgggacgcacaccgcaagggtacaagctggaaggcgaagctgaaagctgccatagatgcagccatcccgcaggccaaggattttgacgattttctgcggctcctgcaggagcaaagctatgaggtcaagaggggcaagtatgtgtcgttccgtgcgcccggacaggaacggttcacccgctgcaaaacactgggagaagcctataccgaggaagctattaccgagcgcattaaaggacggtccgtggaacggaagcccaaagaaaaccataaaatttcgctgcggattgatttggagaacagcatcaaggcccagcagtccgcagggtatgagaagtgggcaaaactccacaatctgaaacaggctgcccggacgctgaactttctgacggagcataaaattgatagttacccggatttggaaagccgggtggccgagatcaccgccgccagcaccgaagctgccgccgcattgaaagcagcagagcgccggcttgcagaaatggccgtgctgataaaggatgtaaccacctgtaaggaactgcacccactgttgcaggagtatcagcgggctgctgacaaaaagcagttccgacgtaagcatgaaggaaccttgattctctatgaagcagcggcgaaagctctaaaagagcagggctttcaaaagctgcccgacctctacgccctgaaaaacgagtataagcaactggccgagcagaaagaccagatgcagcggcagtacaatgatgccaaacgccagatgcaggagtatggcatcataaagcagaatgtggacggcattctgcggacagcaccgggaaaggagcagatgcaggaacggtaaatctgcacaaaatattgttcggacttttgaatcccaaacgcttagaccgggtggcgtttccgcccgaaatcatgtaaaatagacttagacaacgaaagcgaggaaccctctatggcagaagtgaacgataacagctctatccagctttttgaagatcagaaaatccgcactgcatgggatgcagaaaaggaagaatggtattttgccatcgttgatgtgattgctgttctgactgacagcgcagacccacagaactattggcgcgttctaaaaaagcgtcttaaagacgaaggaaatgaaaccattacaaattgtaatggtttgaaaatgaccgctcctgacggcaaaaagcgcaaaacggatgtcgctaacactgaacagctcctgcgcatcatccagtcaatcccatctccgaaagctgaaccgttcaaggcatggctggcaatggtaggcaaagaacgcatcgaggaaacaatcgacccggagcaggccattgaccgtgcgcttgatacctatttgaagaaaggctactccgaagaatggattcaccagcggcttttggcaatccgtatccgaaacgaactgacagacgaatggaagaagcgcggagtgcaaaagggcaaggagtacgccatcctgaccgatgaaatctcccgcgcatggtccggcatgaccacggggcagtacaagcggctgaaaggtctgacaaaagaaaatctccgggacaacatgaccgatttggaacttgtgctgaccatgctggccgaagcctccaccacggatatttccaaaactgcaaagccacagacctttgaagaaaacaagcaggttgccaaacgtggcggcaaggtggccggcattgcacggcaggctcttgaagcggaaaccggcaagcccgttatcacagaaaagaatgcgtttgacttccagcagcttgtgaccgacattgtagaagatgccgccgaactgccggaaaatcccaccgagaaaaaagataaagactgatacataaaaaatagccggacacagcaaccccaaggccaccgtgtccggctatttctgtgttgacaaccacacattactttgattgaaaataatgtgtggttgtcaagctggcggtattattcacccgtaaaatcaaacctctgtccgtcaaagtctgcatcggtcatgcgctccaacttcgcaatggtgccttttgtcagttgccgcatttcagtgtccatatccggccgggcggccagcatccgcgccatcgtccggcggcggtcagaagtgtggtacatacaaatcaaattttcttcttctacgctgaaattcatgcgtcatacctccatttcgtgttgcttgctgcgggccgctgcttttttcgggctggcggcctgctttgtttcggaaagctgcttgcggacggaagtgcggggcttgcagatgcccttgtcccggttttcgtttttgccaaccagcgcgtagatgccgaaacggtctttcacgctggacaggtgcagggacttgtacggcaacatggcaagcagctggtccgtatcccgactggatgccagtttggtgaagtagggcgatacctccaccataaaatgatttttgtccgggctgttgggagcagccagccgcttcatatttgccgcgatacgctgcgcctcggcctcgatcagcccagtgtgcagtgccgcaagatgttctttgaaatcaccgggccgtgccggttctcgactgcgctgctcctgccggatggccgcttgtagaagttccgggtcacggggctgcatttcataccgcacgaactctccaaaatatttgtccgagcggctgttgaaatgctctttggggccaatttcccgcatcccactttcgtagatcaggcgattggcacccacaggcagagcggcatcccggatatgctggaaatgctgctggtagtccagttcatacagattgccttgcacggttccattggccgcaccggtcaactccaccgcataggcaagaatcctgtcatgggtctgttcaccgcaaaatttccatgtattgtaggcttgggtatctttgagcaacacatcccgttcccggaagcagaatgttccagagggccgggacagccacaacagcagcttatcttccggctggtcgctgcgggcggcctcccgcagcatcttgatgtcataggcaaaatcgctctggtagtatgcggtgttctggtgcatgatagcttccagcgcagcgatcacatccatattttcaaatctctgcacggtttacacctccaattcctttgccttttcccgtggctgtgtttgcttgctctgctccttttttgtggcatccagctgtgcccggatggacggctttttcggtttggctgtgcgggacttcttggcttttggcgccttttcctcggccttgactgcggcggcaaggtccgtcagagaaatttgttctccggcctttgctttggcctccaattcgcccagagagggcgcattgttcagcacaccgtcaatcatgttttcgttttgttccgtggaaagctctgcggtgcgcagaggattttcccgcaagaactccggcacctgctggaagcccacactgtcacagtagtgggcggtgtcctgcccattctggtgcagcaccaccacatccgaaacagacagcgagtgtcccttgaaatctgccggatggtccacattgaatgtgcggtagatgtcctccaacgtggtgccagcagtcagcggcgcggcgtatacttccgtataattggccttgtccacggtcaaaccggtagccagcaggcggtcgtagggctcaaaacggtaatcgcgggtggaatcctcgttgcgcagttggtagatggaaaagctgtcctgctgtggtgcttcaaagcctgccgctgcgtattcctctaccgtcattccagcatcggccgcttcctgcgcgatctctgcctgcacctgcgccttgtagtcctgcaagctctggtcaaagtcggccagcttgggcggttccggcaagttatactggccttggttgagcagcgagcggcagtcctgcacataggccacaacagtgttgtaataggcagcctgttccggcgaaatgttctgtacctcccgcaaagcggcggtggctgcctgctccatggccgaaatattgcaatgttgtttgaggtacgggataaactcgttcagcaccatttcccgctctgccttgtcttgttcccacgcttccgggcctttgttgtgcagaacaaaatttctccagctctcgtccttggcgtagtattcgtggtagttctggatatgctgaaccaaagagccctctccgtcaccgaaatcctgccgcccctcgtagttgtcgggctggccgttcagggtaaaatcaatacggaatgcggttttgtcgtaccagccgcccgtgtagccatccttttcccggtccgtgtgctgggcggtgtccagttcttcaaagacgcggtttgccacggacagcggcatgatttcgccgtcctgcagcttgtcactttcgctccacagaattgtgaccgtgggctctgcggcagggtctggaattttgacagacgcgggaagttcgttggccttttctgctgcatcttggaatgccgccagcttatcgcccaaaagaatttccgacaccggggctgtctgccccagcagattaagcgcttcctgcccggcatccgccaaggtcagaccgggcgcgtccagctgcccgccatccagagccttgttgtccgggccatacagggtgtagtcatagccggaatcacaggtctggatgaacagggtgctgccgttgtccaatgcaaatgcggcctcctgtgcagcggaaaggtctgcttcccgctgctggcgcaattcggccagatgttcgtccagtgcggagatcaactcatgggccgcgctgcggataatttccagagaggctttcagttcggccagttcccggcccgaactccacccggccacataaccaaaggaatactcagatgtgtccagcccgtagtgctggcagactgcataagctacgctttcggcctgcacctcgcgggtgcggctgtccgggcggttgatctgttccgggtcggtggggtcgatggcgtgaagtttggcatgggcaatttcatggatagccgtcttgatggtctgtaactggctcatgccctcttggatggcaatgcggttgtcgagcagatgaaaatagccatgcgccccgccctcgatgtcctcaaacccgatgggcaccggggatgtctgctccaacgccttgaaaaaatcttgatagtcctgcacgctgccggaaagttcattcaccgcaatggatggcagcggttcgccctcggtctggctgacatcgaacacagaaaccactttgaaggccggaatctgcaccgttttttcttccgtcagcggcttaccgtctttgtccaaaacgggcttgccctgttcgtccagtttttccgttttctgcttgaccttgtagggcgcgggagcaagaatcttgatgcccttttcgccctttttcacggtgcggtggaacgtgtctttccacttgttgaaacccgccaccagctgtccgccctgcatggcgatcagcaaggtgttgttgaagctgtaattgtgaaacttcgccatcgtggtgaggtaggctttgtagcggtcgctgtcgaacagctcttgaatccctgtttccagccggtccgtaatttctttcattcgctctgcgctatctttgccgttcagaatgattgggagaaccttttgcggctgcggctcgctctgcataggcggcgggatgttagctgcatcccgcaggatttccggcacaggaaaggacagcacccggtattcttccggcacaggctggccctcgtggactttctgccactcgtccccgcttttgacaaggtagccgtactgggtgaacactccctgctcctgctgggccacataccggccaaactgtgccgtgtcgatgcctcctttccattcctccggcatatccaccatgccggaacggttcaagtagtagtctcccagctgggcagggccgcgtacctctggcagatgcacataatattccacgttttcgggaaagtcggtgattctcccgatgctggaaagctcactctgcgggacttgcagggcggcgttcagctctgcgcgttccccggtagaaagcgtttccagtcgtgatgccagaaagttcagttcgtccacattggatgccagtaccatgttgtagggaatcgcaaaacgcttttcttcctcggcaaaatagccggaaatgaaaaggccctgcagattatcggacgaaatgccgatttgccgcagggctgcttgtacctgttcggttgtggtaggcaggtccagccaaacgccatctctgccttgctgctgccgattttgcagctggatggaaaataattcgctcatttggtcacactccttttttgctatcctacggatagagagagccggttatggcaaaatgaatgcttcaccttaccataaccggccctcgtatttttgccttactctttgcgctctacccggtaattgacgtacttgcctcccgtatctgccagaagcaccgttgcatcataggttttgcctgtcttttcggaatagaggcccttgacctttgccttaccgtttttgagcagagcagcggcgatcttcggtgtgaacgcctttttgcgctgctcaaagaagcggtcattcttccacatcacgaactgacagctacgattcccgcagtagaagtttttcttgccctcatagacgttttcactgcaccggggacacttgccgacaataacccgttccgactggaacaggttttgcttatctgcactgatacaagaataggtcttgaccagctgacgcacctgcgcctcaatttcggccatgaactcgtccgggtctgcattgcccttggcaatatcggtcagacgattctcccattcggcggtcagagagggagaggtcaggctttccggcagaaccaccgccagattgatgccgtccttggtgggcaccagttgcttgcccttgcgctgcacaaagcccatttgcaccagcttttccagaatcgcggcgcgggtggcaggagtgcccagtcctttgcgttccgtggcttccggcatatcctcggccccagcccgctccattgccgacaggagcgtatcttcggtgtaggcttttggcggggacgtgaaatgttccgaaatgtcagttgtcacggaaaagttctgtccctcggccagttccggcagggtgttcagcacttcttcctcggtatctgctttcagggtggagcggaaccgctggtcgatctctttccatccggggacaagcaccgtttttcccttggcggtgaactcgttccctgcacaggagaacacggcggtcactgtttcgtactcgtggggtgcggccaccgcacagagcagtttggagcagacaaggttcatcagcttgcactcactttccgcaaggccggtgaagccctgttttacaaattcggccgtgggaaggatggcgtggtggtccgatacctttttgctgttcagaatccggcccacttccggggtcaagtcaagctcttgggcaaagggcagcagctccagcaggtcaaacacaagatgttgtgctgtctggcccatgtcctcggtcagatattggctgtccgtgcggggataggtcagcagtctcttctcgtaaagttgctgggcataatcaagggtctgctttgccgtaaatccgaacaggcggtttgcctcccgctgcaaggtggtcaggtcatagagcttgggcggctgttccgcctttttctctcgccgaatggacgtgcagactgcatttgcacctgtgcatttttctttgagagaatttgcggtttctgcatccgcaatgcgtccgctgtccgctttcaggctgccggactggatgccgactgtgtaatacttttctttttggaagcgcagaatttttgcatcccggtccaccagcattttcagtgtcggggtctgcacccggcctaccgtcagggttttgtgatacagcaccgaaaacagccgtgttgcattgatgcccaccagccaatccgcctttgcacggcagagggccgattgatacagagcatcataatccgaatccgggcgcaggtttgcaaagccctcccggatggctgcatcctccatgctggaaatccagagccgctttacgggtttcgtgcagccggccatttggtagacgaaacggaaaatcagttctccctcccggcctgcgtcggttgcggcggtcacactgtccacatccgggcggttgagcagggcacgcagaacttcaaactgcggtttcttttcgtccgggacaatgaactgccacggctggggcaggatgggcaaatcttcatacttccacttgcagtatttttcatcgtactggcccgcctcggcaaaggacaccagatgcccgatgcaccagctgaccagatacccgccgccctgccagtagccgttttgcttttcagtggccccgatcacggcggcgatgctgcgggctacactgggcttttcggcaattaccagctgaacgctcatgtttcgtcctcctgtccatcctccgaatgaatctcgatttcagcaggttcctcgtctgcatcctcgtcctcgccaaaatcgtattcgtccagatcatcgtgcccggtggtatcggccttgggcttgcggaacttgaaataatagagtgctgcaccgccgcccgatagagccagcaccagcaagatcatcagactgcccatgttggacttcggcttttcctctggcgtttcagtgtcagttttcaccgcttccggggccgtgcagttgcgcaggctcttttcacacaaggggcagttttcgttgacgtttccggcctcacatttcaccgtgcaggtgcagacctcggcggtctgcggttcttcatccagcagggccagcaagtcggcatcgtccacttggttcaggaagtgaacggacgtttccttgtcctcgttggcgcggtcaatcaggatgtaaaaataattcccggctttggtggtcacggtgataagctgcttgtcgccgtagaaatcgtccaccagtgttgcgttgcctttgggtgtgatgggcacaccctccggctccatgccgtccgtagtgggttcttcttcgataatctccggcagaggttccggggcagggtcagtaccgcttgcgaaagcgggcatggaaaaggagcagaggcagagcaggatagccagcagtccggcagcgaaacggttccagttgtcaggtttcatcggcggcatcctcctgtttgtggtacggggtgacagtgggtgcagcgttcagcgcaccgctgcgcagaaaagccgcaaactcgtccggcttcatattcatgctgcgcaccaactgaatgatctgcaaattttcctgttcggtcttttcagcttccagttctttcaactgctgctggtattcgctgattttttctttgagccgttcaatgtcgcgctcaatgcgggaaagtctttttgccatacaaaatcctttctggcgtcacggtaaacgcccatagctgtaaaaatgttcctgccaatatttcgagttgaggtttgtgtaagagatcgggtcgccgcagtgcagcatgatggaattgcccacatagataccgcaatggctcacgccgggggtatcgtaggttcccttgaaaaacacaaggtcgcccggtttgacctgcgccgtcgaaacaggagtacagaggttgtaaaggccctgtgcggtctggcggcccacgttccagccggagtgattcagcacccacgaaatgtagccgctgcaatcaaagctggtgctgggcgaactgccgccccacacatacgggtagccgatgtacttggtggcttcctccatcatggcggcaaacttatcatctttgagggcttccgggggaatgtcgtaataggtgggctgcttgatggtggacgcattggggtactgtgcctgcccgaacaaatccggccggttgcccagcgtgcgcatatagagcgaataagcactgagttgttcttcggtcagcacttccacgggcaaatgggacaaatccttgtttttcagcttgaccgtgcagatgtagtattcatacggttcttggtaggtgataacttgcggcacaccatacgggccaataatgaccatcatttttgtacggtaacgtatctgcatggtcacggtctcggtcaggatgtactgcttttcaaagagcatttcaagttcgccctgcacctcggccagtgtgaacacgccgtcatgcagcgcggacaaaatcgagatcagcacataggggtcatgctcgatttcatccagataaaaatgatactcgtcatagttgtgggtggcctcgtaggtgtcgagataccgttgcagcttttgttccagcttggcataagccttctctgcacccagcatatccttgtccttggaaaaataagaagatgccgtcacgccggttccagcggtgcccgccatcacggtgcaggactgcaaccccgttatcaggagcagagccagcagaccaaacaccgccacgatcagaatggttttccagttccaggccgcaaattcggctacccgttcgccgccctcggccgccagcttcgttacccggaaaccgttctctgcggtggcagctgcaccctgcgcggcggcttgtccggcctgccgtgcagctttggcatactgctgtttgatacgccgtttctgccacatccgggaaatggggttgctggccgcctgtgcaatttgcggattgtcccgcaaggatttctggtaaaagtattctgcattggcagacatgagctgacgctctgccttttccacggccttgtagggcttcatcttgtggtgccggatgccgctgcggatggctttggcggtctgacgctccaccagttcttcacctttgtggccgccctccacgcccacattttcgtgttcgacctcgtggatttttccgtgagcgaacagcaatgcttccgacagcgggcggctggccgggtttggtttcaggctgggcgggcctttgtcctgctgctcaaaccgcagggtggattttgccttgccgctggctgcatcgtaaactttttccttgaccgggacacgcttcttcggcagagcggcgcgggccgcatccagcttgtcggcctttgcttccgccttgtggatgtacggctgcaactccgggtctgcccgttcgtccttggtcaattccaaacgggcagcggaacggtgcagaccatcttcacttttggcggtggccgctgtttctgctgcctttttcgctttctttttatttttatgcccgtccttgatgtcctcggcccgttccagaattttttcggccttgccctcggcatccgtggaataatcctgttccgcttcccggcaggaaacattctccacagtgccgtcagcctgattttctaccaccagaccgtcacgggtcatggtctgggtgactttggcttttgcctgcaattctttcaaggttcttcacctcccatcggacagcagcccgtttcaatgtccgcaatgtatttgagaatcgggaacacctgcggcggcgaaactgcattgcccagtgttttcatccgcttgctgcggttcggcacctcttcggtcaggcgcgggatgtcggcgggttcttcggcccaaagggaatgtccgtccatttgcgcgggaaacccatcagccactctacccagtccgggttgaggtagggcctttccagcgtggtgggggtcatgcggtagaccacatgagagagccgcgccgtccatgctttgccatccttgttcatcttgcggtaactgccattcgcagagatttggatgtccagccccttgcccacatccccggtgtcgctggcaaggggcgtgggaagcagcggagccgatgatgaatacccgtttccgttcgtgccacgcgccaacggcagcagcaggtaatacgaaaacccgaacatcgtaacctgcctgctccaagtcaatgagcgttttgtcgagccccatacggaggaagccagcaacattttctccaagcacccaacggggctgcaattcccggatgacccgcagcatttcgggccacaggtagcgttcatcgtggaagccgcgctgccgccctgcggtggagaacggctggcacgggaagccacctgaaatgagggtgacggtgcgaagtcctgttttttcaaagaaagcctcctttgtcacggtggtgatgtcctgaaagcggggcacctccggccagtggcttgccagcacagcggcgggaaaggccgcccactcgcattgacagacagaggtgaaacccgctgcttctgcggcaaggtcgatgccgccgatgccggaaaacaagctgaaatgtgttaagctcatagctccaccacctcgctgagccgggtggtcatgatcttatagagctgggtgtttttcgggatggggtttgagaatggcagcaccacattttcaaaaatcagcagtccttcgcccggttcggaattgtcaatgtacttctgctggtctgcggagaggttcagccgttccgaaaggattttgcggtcgccggatgcctgattcagcagcgtgatgaagtcgctgttttccagaatgttctcgatctccggcgaagaaagaaggtccttcacattctgggtggcgcctgtgggcacaccgccccatttgcggaagcgtttccagatctcggcactgtacgcggcggtctgttcttctttcagcaaaaggtggaactcgtctgcaaaataccatgtggcccggccttggctgcggttttgggtgacacggccccatatctggtcttggataatgagcatccccaatttctttaactgtttgcccagttctttgatgtcaaaggccacaagccggttgtggatgtccacattcgttttgtggttaaaaacgttcaacgagccggatacatacaggtcgagtgcctgtgccacccggtccgcttccggcaaatgctggtcgatcagagcttggtggaggtcagacaaaatcggcatattctccgggcaggggtttgcaagataggggcggtagatggctttcacggcacggtctatcacggtgcgttcaatcgcttccagacccgttttgccgcccatgaccagttcacagaacgacagcacaaaatccgatttcagggcaagcggactatcatcctcggagtagttgaggttgatgtccagaggattcacatagtccttgctggtgggcgaaagtttgatgacctgcccatgcagccgcttgaccagcggataatactcggcttctgggtctgaaataaaaatatcgtcagcagtcgttaaaaacacactgacgatttcggacttgcagctcatggatttgccgctgccgggcgtgcccagcttcaagccgtttggacaccgggcctgcttgcggtccagcatgatcatgttgtgggattttgcgttgatgccgtagtacatggccgcaccgctctggaaaagctcctgcgttacaaagggcacgaacaccgccacgttggaggtggtaaggctgcgctgaatctttatctggttgatgcccagcggcaggctggacacaaggccctgttcctgctggtagtccagccggacaagcgagcagttatacttctgtgccacacctgcggcttggaacacatcgttgcccagcttttgcttggtgtcggccacattcagcacaagaaaggtcagcatgaaaagccgttcgttccgggtctgcaatttgttcagcagctttttggcgtcctcgccgtaagtggcaaggtcgctgggcaggatgtccatgtcgtacccggaacggacagcctttttctgctcctgaatcttcatggcgtcaaggtctgtgatcttccgcttgatggttttgatggcctcggtctggtcgatggcctgcacatggagattgacgagaatgccgctttccgttttgagaaaatcggccagcatttcatccgaaagttccggcgcaaggatttgtaaaaagctcacagctccatatttgccgcccagtccaaaagtcttggccgtgccgaagcagagggaggacggggccacaaaatccttagtggacaggccggagggtgccagccagtcccagtcaaagcggaacggttccccgtccgggtggaagatgccgtgcagcacctccaaacgcgcctgtccgtccatgacgtgcgccacgcagcccatggtcttgaaatagcccagcaggtcaagaccaatgcgggtcagccgcgcccgtgcggtttttagattgtctgcctcgatggtgaaggtcaggtacttggttttgacaatgccgttgtttccgctggcaagctgcttttgcaggatggcggtgtactcggcgcggatgtcgtcaaaatcatccccctgcggtgcgatctcaaaactttttgcgtactgcaccgggtcaaccttgcgattcaaaaacgaaagctgcacatggatggaggcatccacatagttgtacaggtcgcacaggtgttcaaagatggcggtcctcgtttccggctgggccagctgatagctgatgtcctcaaaggcaatgcacttggagaacgtgcgtcggtcaatgcggcacacaccgtccgggtagatggcctcatacgggatggtggcctgtgccgtgcggggcttgccgtcacccttgtacttgcggagaacggcatcaatttcttttttctgggcgcgggtgagctttttgggcttttcggtttcgcggggtatcgtttttctggacaatggcctttacctcctgttccatttggtattgccgcacaagggcggcgtaagcattgttggtctgatagggcctttccttgggacgaataaagcagcactgaatcatttgctgaatcaccacttcaaggggctggccgtgccgctcgagcagagcgaacagcagccccggcagcatggcaaaaatcatcagcagggccgctgcactgttggaaagatagtcccgggtcaaaaaataaagcggcccgcccgtgaggagcgcgccgccgaagcagaccagctgccgcttggtcagcccgaataagactttggattttacatgggtcaaatctttgggaacggtcacatacgccattcaaacgctcctttctcaatgggcgccaaacacggatttgctgatgctgccggtcttgaacagacagaaacagagtagcacggtgtagcccatgcagccccagatggccccggcaatgtccgctgcacctgaaatgttgcgtatcagcaccgcatagatgcccacgacaatcataatcaggaacgcttggaagcctaacgccaaaagcgatttcaaatagttctgcccggtgctgcgccactcgctgctgcccatggtcgccagcgggataggccccagtgcggtcacaacgtaaatctcaatcatgcggccgtaggtcacaaggaagatgcagatggacaggatgttcatggtcaggcccaccacaagggtctggaaccacaggctgagcagactgccgatggtcatgctttccagctgaaattccagtccgggtatcaggcggtcaaagtggatggacgtttcgccgatgatcacgccggagctttggttaacaacgctctgagtcgcatcgaacacgcccatgacgatattccatgtgttgctgacaatgaggatggcaaaggcagacttgaaaatccagcggaagaacatagaagtgtcaaagtcgtgcatattgttcttttcggtaatcatctggataagctcatggcacatcacaagggcaaggatagccgctgcaatgggcagcaccaccgtttcggaaagactgcgcagcatattgaaaatgccgctgttccatgcctgcggggtagaaccaacgtccgaagcgatttcgcccaccttggcgttcacgttatcgaacaggccggagaggttgcccgtgatgccatcgatcaaaatgccttttatccatttctcgatgatctcactaatcaagcaaagatacctcctttcccgcgccctcccatgtgagagggagagcgcggagtaggattttaagtattcgttgttcggaaaattgtgggcagtgatgcaggacttagcccagcagcccggacagcagcgggacaagggtcacgccgatcagggcaacgccgccgcccgcgaccagctgcttcacgccctggctcttgctgccggggttatcctgtccgtagccttccaacaggttgatgccgccccagacacacagggcaccgcccaaaccgaccacgatcgtctgcaaagtatcgactgcgctgttgaaaaattccataaggtcctcactttctgccgcttgttctgcggcactcaaaaattttttcaaaaaattccgcctcattcggcggctgcatcttcatccgacaggtcgatttcgtacaggtcaaaactttcgtcctgtgcgaccacctgctgccgtttccggcgcagactggataagaacctgtccacatcaaaggtgttctttttgtccgcgtctgcaaggtacttgtagtgcgggtgtttggtaatgtcgaacttctccgagaagaacggcctcacgccccgcagctgcaagatgcacctgccgccgtccatgattgcgatttcgtcctctgacatcaacgcctttcctagtttttgatagttcagtccgtgggaggtttgagagccccggttctcgctggtgttgaaactgtcgatagtctctttccccagcgcatcggagatctctttggcatttttgccccgcccactcaaaaagagaacagaatcgcagttgtccgaaatgatttcggcggcatctttgtagatggctttcagctgcgactggctctgcaaaatgatggatgccgagatttcccggctgcggatggtggcaatcagcttgtcgaagttgggaatctgcccgatgttggcgaactcgtctagaatcagccgcacatggacaggcagccggccaccgtacttatcatccgcacggtcacacagcaggttgataagctggctttggagcatggcgagaatgaagttgaaggtggtgtccgtgtcgctcataatcaggaacagcacggtcttttcatccccgatggtgtccagctccatttcatcgtcctccatcagctcccgaacctcccggatgtcaaatggggctaaacgggcaccacagcttatcaggatggaggaacgggtcttgccggccgacagcaaaaactttttgtactgccggacggcgaagtggtccgggtctttctgttccagccgttcaaacatgaggtctaccgggctttgaaactccgggtcgtcctcgcgggtttcactggcatttatcatttccagcagggtggtgaagttcatttcctctgccggggcctcgtaccagatgtagccgatcagagccgtgtagaacagccgttccgacttcacccaaaaatcttccgctgacttttcgccctcgcccttggtgttggcgataagtgtattcaccagcttcagcacgtccttttccgagtggatgtagacaaaggggttgtacttcatggacttggaaaagtttatcgtgttcagaattttcacccggtagcccgcccgctggaacatttggcctgtttcgagaaccagtgtgcctttcgggtctgtgaccacgaatgaggtgggatagtcggaagtgggaaagcattgcatgaggttgggcttcacatagaagcgggtcttgccgctgccggagccgccgatcaccagcacattcttgttccgggccgtcttagggtctttgggccgcccggtcatggtcaggcgttcggtctgggtcagcaggatgttgttttcaaacttggggtcgatgtacggggcaatgtctttagcggtgccccaccgggcagagccgtattcttcacccttgcggtacttcttggcattcttgcctttgctgtacacaatgagccggacagccaccgctccaacaacgcccacacacaggtcaaacggatgcaggctgggcagcgggtttgcaaaggcagcagagatgccgttcgtcaggtggagcagctttgccgaagcatctgcgcccgccgcaagacggtacgcctgcccgcatttggcgaacaggtacacgaacagcagatacggcagattcagcaccagcagctttttcagctcaggcttcatcgttccagccccctttgcttgactttttctttggcgcgttttggctgctgggccgctttctgcttagccactgccagcactttgcggatggagggccgttgctccttggtgagcgttttggccgtgaactcccggaacgcctgttccagattgtccgcatccttggccttgaagatcacgatgtagtggggcggctgggtggtcttgtccttgcgcagggtaaagtccacgccgtacttcttggcgcagggcttgaacgccccgatgttcgcctccgtgacttcaatgttggtcagggccgcgccgtgggctttcagctgtttcaggctttgcttgccgtggtgcagctttggccccttggcccggtgctgcaaatattttttcagggcagcttgcaacgcttgggcggtgagcttgcccgttttcatggacagggcaatagttttctgggtgacttcttcctgcaatatgaatccctccttgttgcagaaaattcagagcggcagctagggtggaaccaccagccgccgcaggtaaagtgttctcatggatgggtactcctttcggtcaggtgttgggcgggcggccccaatcgggctgcgccatatcgtgcgccacaagggacgcatagtagctgttgatggtgctgggggcgttgaacagcatggcccgcaggtattgcttgatgttgcggactttggtggtgttgtcccgcaggcagtccatgacgaactcgatgtgatggctgtccagcttcaagaatttcgccttgaccaactctgccgggtaatcgtccccggccacccggatggacttgcggttggtgcagacggtttccagcaggatgtccacgatttcgtccagctgttcccggtctatccggggattctgggtgagggtgtcatactcgatattctctaaaatcaggtcccggtagatttgataggccgcttcctttcggcttcctgtccgttccggcggcggtgccgctgcctcgtcctcgtccaaaggcaaggggtttggggaatggataggaatggaatcggtatttgatccctctttcttttgtttttctgtaattagtttatctttatttaattgcattggattttccaacgtagggttttcctgcgtgggattctccaacgttggattttccaatgtaggtgaaaccgatgcaggaacgggctgcggcagctcgaaaatcacatagtctgcaccacgcagccgccctttctcgtcccgttctctggaacgctggatgtagcccgcctgttccagttcccggatggcctgccgtatcgcgtcgatgctttcccggttgatacgggccagcccttgcagggtgtagtcccaatcttccggcagggagagcatttgggagagtaagcctttggctttcagggacaaggcccggttccgcaggtggtggtttgacatgaccgtgtagccgctgttcttttctacccgaaaaactgccatttcacggatgcctcctttctgtttttgggcaaagaaaaagccgcaggctttttgtgaaagtctgcggctatgccgattgttagatattcaattctttgtgtttccgcactccatatcaattaccaccgaaacagtaatgtgattttcaatgcgtttgttgcggagtttatcgccctcgccatcgaacacaacgtgacgagaaaataacgtaaaacggaggatttctactagatttctctttgtagcgaaactatcgcttcgacgtgctccgtatgcgggaacatatccaccggggtaaagccctcggccttatagcccagctttgtcagggtggcaaggtcgcgggcgagggtgacggggttgcagctgacatagaccacacgcttgggtgccatacgcgccacgctggcaaggaattccggggtagagccctcgcgcggggggtccataaagatcacgtctgccttctcccctgctgcggcggcttcactgatccagcgggtggcatcggcggcaaagaagcgggcgttctttacgccgttgtgctttgcgttgccaatggcatcctgcacagcgtcccggttcagttccacgcccaccacctgctttgcatggtcggcggcggtcagaccgatggtgccgatgccgcagtaggcgtccagcaccacctctttgccggtcagttttgcggcttccaccgcaaggccgtacagcacttcggtctgggcgtgattgatttgataaaagctgcgcgggctgatggcgtaggtcttgccgcagagggtatccagaatgaatcccttgccgtacagcaccttttccgcttcgcccagcaccacgctggtcttgcggctgttcacgttctgcaccacggtggtcacagtcacgccgcgctgcgctgcttcggccagcagtgccttgacaaagtttttcgcgcccggcagcaccggctgcgctgtcaccagcaccaccatcacctgcccggtggctacgccccgccgcagcaggcagtggcgcagaaggccggtgcccttgtcctcatcatagggctggtagcggcaggcgttagcggcagcccgcaccgcctgcatggtcttgtccagcacctcgtcctgcagcaggcagctttccaccggcagcaccttgtggctgtttgccgcgtagatgccggaggtcagctttccaccaaagccgggagcaaaggtggaaatcaccttattgcggtagtggtaaggctgctccatgccccggatggggtgcaccgggccgtatttgcccaccagagtacgcactttttcttccttctgtttcagctgttcggcataatccagccccagcagggggcagccgccgcaatttttggcacgcagtttgcaatccatggcagtttcttcctttatataacagatactctcttttcaggatatcacagggcggggtggattgcaactgcaaggcggggcgatttttgcagttttcttttttaccgccgggtctttactttcccgcgatgatttgccataataggggcagaaaacgaccgtttacgggagggctataagatgaagatcatggtttttgatgtaggcggcaccgagattaaatactcggtcatggacgagcagatgcaccgcacggacagcggcgcggtgcccacgccgcaggatacgcaggcgcagtttctggatgcagtctaccggctgtatgcgccccataaggacgaggtgaccggcatcgccatggcgctgccgggctttgtggataaccgcaccggctatgtatccaacggcggggcgctgctgtacaacaccgccaccccggtggggcagctgctggcagaaaaatgcggctgtcccgtcatcctggaaaacgacggcaaggccgccgccatggcagagctggcaaacggcgcgctgaaggactgctgcaacgctgcggtgttcatcatcggcaccggcgtgggcggcggcatcattgccaacgggcagctggtacgcggggtgcactttaccgccggagagtacagctttgtcaacaccaacgccgaggcgtgggacgccccggaccagaacatggcctgccagtgcagcaccagcaatctgcttaaatggtaccgcgcccgcaaggcactgccggaggatgccccgctggacggtcggagcttttttgccgccgccaatgccggagagccggaggccttagaggtgctgcggcggttctgccacgcggtggcggtgcagatctacaacctgaccgttctgctggatgtggaaaaagtggccatcggcggcggcatcagcaagcagcccctgctgctggaaagcctgcgcagcgcctacgatggactgtacgcctcccgggcgggacaagcttacatggaaggcttaccccgctgccagatcgtgccctgcgccttcagcagcgaggccaatcaggtgggcgttgccgccgcatattttgaagctatgcagaaaaaatgttgatttccagccggtttcatggtactatatctgccgtgtgctctgcacgcaaaacacgaaacaaggagattttgaaccatgaacactctgcataaatttgccgttctgaccctcagtgctgtgctgaccgtctgcctgctggcaggctgcggcgcttccgcttcctctaccgcttccagcgcagcctcctctgtggcttcttctgtggccgcttctgaggttgcttcttccgctgccagtaaggcacaggccacggtggagttcaccgttaccgctgcggacggcagcgtttccagcgttctgctgaacgtgaccgacggcgaaaagctgagcaccgcgctggccgaggccgggatcatcagtcaggaagaggctgatgccggctttgtgaccaccgtgaacggcgagactgccgactatgataaggaccaggcatggtggtgcctgaccgacgctgccggtgagatgaccaccgtgggcgtggccgacattgaactccacgacggtgacagctatgcctttacctacaccaaggggtaaaaagccggtggcgctgcacacccgggtgctgcggctggtgctcagcggcctgatgggcgcgctgctggtggtgagcaagcaggccatgagcggcctgcccaatctggagccggtgagcctgctcatcatcctgtttgcactggagctgccccgagagacccccggcgccatcacggtattcattctgctgcaaggcgtgctgtacggctttggtctgtggtgggtgatgtacctgtatgtgtggtatctgctggcgctgctggcatggctgctgcgccgcatggacaacgcctttttctgggcagtgttcagcgggctgtacggcctgtgcttcggcgggctgtgcgcggcggtgtatctgtttgccaaaacgcccgcctttgccctgagctggtggctcagcggcctgagctacgatgcaatgcacggcgtcggcaattttgtgctgatgctgctgctctaccgcccgctgcgccgtgcgctgcaaatggcaaaaaagcagctgcgggtataaatagtattatataagcgatggggctactgcattttgcagtagccccatcgctttatgctttatttattttggcaaaggcctgccggacatcgccggagaaatacagcgtgcccagtgcgcacaccgggccttcgccgcccagttcttccgcacgcgctacaccggcctcaatgctgtccacagcctcggcggtgcagccgtaggcgcggatatgctccgccagcgtctgcgccggcatggcgcgggggttgtgcgccgtcacggtcacgaaccgctcggccagcggtgccagcagtgccagcatctcgtccacgtctttatctgccatgatgctgaccagaaagacgaatttctgcccgggaaagcggtctttcaggctctgcactgtggcgcgcatcccgtgggcgttgtggctgccgtccagcacaaaggccgggctgtggcgcagcagttcaaagcgcccgggccagcttacctgctccagtccggtgcggatggcgctttccgggatgttccagccctgctgccgcagcacccgcagggcggtgatggccagcgcggcgttgcggggctgatagctgccgatgagcggcaggcgcaccccgtccagcccgtcaaagctgaaggtaactgcatccagatccccgccggtgatttgcagcttggcaaagtccacctccgtaaagggggcgtgctgctgtgccgccacccggcgcagcacggcgtctgcctccggtgcaccgccgtagcttaccaccgggcaccccggcttgatgatgccggccttggcagcggcgatatccgccagcgttggacccagttccttgacgtgatccatgcccagtgctgtgatcaccgcgcagacaggcttttcgatgacgttggtggaatccagcgtgccgccaagccccacctccagcaccacgatatcacactgctgctgcgcaaaatagagcattcccagtgcggtgatgatctcaaactcggtgggcacgtcctccatggcgtcggcggcgggctttacctgttctaccagcgccaccagcgcttcgtccgggatctgctgcccgttgatctggatgcgctcgttaaaccggttgatgaagggcgaggtatacagccccacccggtaaccggcggcttgcaggcaggaagccagcatcgccgccgtactgcccttgccgttggtgcccgccacatggacgaattgcagctttttgtgcgggtcgcccagtgcagccagcagggtgcgggtgcgggtaagcccgggcttatgccccgcccactgcaccgcgtggatgtattccattgcctgttcgtagttcatagatactgcctcgattcaaggaataatattaaaaatttcggaacaccggagcgtctgcagacgctccggtgttccattttacgaatctcttacttctttgccagcttcatcaggctgcggttttccagcaggatgcgcagcagcacaacgttcacggcgctcaggatgagggcgttggggatgcgcactgccagtgttgcccacggatagccgtagaacaggcgcagcgccagcgaggtgatgaccatggagcccacaaagtgccccagcagcacgctggctgcaagccgcaggttggtggaaaggctgctcagcttctgccacgcaaaacccgccactaagccgatggcgcccgcacccagcgtgatgagcgggttgatggcgtagcccgccagcacaccgccgatgatatcggccactgcacccaccgcaaagcctgcgccggggccgaacaccaccgccgccagcagcaccggcagactgcccagattgaaccggacgaagccggtggagatgctgagcacccggctgaacacgatgctcatggctaccagcaaagccagcatggtcagggtacgcaccgaagtttttttgtcgttcattgtagttgtcctccttaaaaaggaacagcaggcaggacgcaaaaacgccctcccctgtgacagaccgcacaaaggagggcgtgaattccaacaacattcacttccgggcaaaaaccgcagacggctctcgcctgcacccaagtccatgcagcagcgggatgcagaccctgcaccgcggtcaataccttcgtccgcagcacaactccccgttgatgcggcacttaacgcgcagggtcttactctgttgatgatgccattataatcctttttttgctgcactgcaagcgcccaaacagacatctttgccaaaggagcgtttttatttttggcagtgttgtataaacgtaggacttttgcttgcctgtctccctcttttcttttggcgcagaacgtggtaagatgaacacaagataccaaaggggaaactgccccggaaaggaaattttccatgaaattcagcgaaatgacctatacccgcccggatatcaacgccctgctggcacggtgcaagcagctggccgccaaggccgccgatgcacaggacggcgacgccctcattcaggtgtactacgagcagagccgcgcctttgcggactacaccaccgcctcccagctggccaatatccactacacctgtgacacccgtgatgcctactggaaggctgagcaggacttttttgatgccaacggccccgccgtgaccaacgccagtgtggagatcagccgggcatttctggcaaacccctatgtggatacccttaccgagcacttcggcaccacctgcgtagccggtatgaagaacgccgtgctgggcatggacgaccgcaccgtggagctgcagcaggagttcaacgcgctggtcagccagtaccagcagatctacggcggtgcactggtggagctggacggcaagcagctgaccatcccccagctgggcccctacaaggaggatctggaccccgccgtgcgccgcgccgcctacgaagccgaggccggttactttgacgcccaccggaacgagctggacacactgtacaccaagatcgtcaaaaacctgaatcagcaggctaaggtgctgggctacaaggattacagcgagctttcctatgtgcgcatgaaccgcatcggctacggtcaggccgagattcaggccttccgggatcaggttgcccgggacgttgtgcccgagctgcaaaaggtgatggccatgcgcgccaagcgcaccggcatcacccaccccacctttaccgacctgcccatcatcttcaaggacggcaaccccaagcccatcccgggctatcaggcacgcatggatgccgcccgcaccatgtaccacgaactcagccccgaaacggcggagttcatcgactttatgcaggacaacgagctgtttgacgtagaaagccgccccggcaagatgtccggcggctacatgaccagcctgcccagctacaaagcgcccttcatctttgccaactggaacaacacctccggcgatgtggacgtgctgacccacgagtgcggccacgcctttgagggatatgtggccgagcgcgaccccaacgtgcctgccgatctggaatgccccgccatggagagcgccgagatccactccatggccatggagttcctcaccgcgccgtggcaccacctgctgttcggcaaagataccgagaagtacgccctgctccacgccgaggacagctttgtgttccttgcctacggctgcgccgtggacgagttccagcatatcatgtatcagaaccccgacctgacccccgaccagcgcaacgccgagtggctcaagctggaaaagaagtaccgcccgtggattgattttgacaacctgcccttctatggccgcggtgccggttggcagcgccagctgcatatctacgagtgccccttctactatatcgactactgcctgtccaccatggcagcgctacagttcttcctgctgagtctggacgaccacaaggacgcttgggagcgttacctcaagctggtgcgccgcgccggtcttgccagctacaccgagctgctgcagaccgctgggctgaaggtgccctttgaggaaggcagcgtcaagggtattgcccagcagatgacccgctggctggaagagcatcaggtgggctaaagtcgtttcgtatcagcggcagagcgtttcgtgacagttttcttgctttttctgtcgtgctgcgatatactgaagccagagatcccccttcgaaaatggaaaggagtgctgacttatgagatcttcccgtttgttccggcgcgtcgttgccggtctgtgcgctgccgccatgctgtgcggcggcatggccgcttcggctgctgcgcccgcactgcccgccgcccctgctgcagtggaggctaccaacgccgcccccagcgatgccgaactcaaggccgccttttccaagttcaccgtcacctacgacgaggaggccggcggctgggatctttcctctccgcaggagcaggccagcatggataaaaagtcctgcgggctgtacccctatatgttcttgcaggacgatagcattgcctttaatatgatcctgacctatgttggcagcaagaagctggacatcaaaacggtcaacgtatctgctgatgacgagctgtacacctttacctgtgacgaggaatacggcggcggctacgatcaggatctgggctgctggttcgatctggagctgttccagctgagtgacgaggaggtcagcctgctgagcgagtggctgaacgccaagagcgtcaccgccgtattcgttggccgggacggcaccacccagagctatgccctgaccaaggagaaccgtaccgccattcaagagatggtcaccgcctacaacctgatgctctcctccaccgtagagcagtgcgagcccatcctgaccagtctggcaaagtaaacgcaatttatagagtccccggagcgtctgcggatgctccggggactttttgcactaattttttattttttgcaaaaaaagcttgcaaagccggctaagctgtgctatacttattgggctgtgatgtgctgctatagctcagttggtagagcgcatccttggtaaggatgaggtctccagttcgaatctggatagcagctccagcttaaccgccctgaagtcttaggacttcggggcggttttcgtttatcctttcatccatactacaaaaataccgccgcacagctgtgcggcggtattttttaatcctcgtcggggatattctctgcgtccagcagatactcggtctcggtctgctgttccatctgctgctctgtccagtccagctgcacagcgccgctcaggtccagcgaatagtcctcggtgtatagcagactgccggtgttcaggctgctttctgccgggctgcgggcatcccatgtaaagtgcagattttccggcggcacggtgcactgctttgccagtgcggtcagggtgtagcaatcccgggcaaaggcggcggcgctgtcatacgggccgaacagctccacggtcaaggtcaggtaggtatccccggcgggcagggcggcggcctgctgcaaggtttcggcctgcgggccgctcaggaacattctgccgctgatatcccggatgggaatatcctgcgcatcctgcttgcaggcggtgtacagttcgtcaatggcctgtgcgctcagacggttcatcgtctgctggttttcgccgctcaactcgtcccacagcatgggcagcatcgccatgcaaaagcagcccgccatcagcaccagacagaccagcacggacacaaaatcgtacttccagcggccggggcgggcggcaaagaagagcacctcgcatcccagcagaaccagcgccaccgccggggcaattttcagggtcagctgcacatcaaagcccggcacgaagaaatacagcaggaagaacacgcccgccgcaatgaggcacgcgcccaaggtcaggctgcccacccggcgcaggggcttttctgcgggtcttttttctgccggtttctgctccggcgcgggcgcacggcccggctgtgccgtcaaaggggtcttattctgctcggtcatcgtcatcctccgcaggggtctcgttctgttctgcgtcggtcaccggttcccccagcagtgccgaaagctccggcatggcaaaatgggcgtccgtatccgcagtgtccgcggcatcctctgcatcctctgcctgcggcgcagccgtataggcgtggaaatcctcgggttcctcctcggcgggctgcttgccctttttgtttttcgggccgcgcaccagccacataccgcacacgatcaatgccacgcagaccacgatctgcggcagggcgtccagcatcaggtagatggcgcggaaaaccgggttatcctgtccccagcgccacatcacatcgcccagcacccgcatgatgatgttgttgtagaacacgatggcgcccagcgcgatgagcccccagcccaccagcttgtggctttcgcccatgaactgggtcatgcgggcatcgtgccaattaaagtgcaccagataatcgtcctccggggctttttctgccgccagctgcgcgcggaggttcaaggtatcgaaaaagctgtacatatacacaacgatgcagccgactaccagtgcgtccagccccgtggtgctgcctaggataatgaacaggcagaacattgtgatgagcgagagcccccgcttcatatagccctgatacatctgacccgcaccggggatgcaggcaaacagcagggtcaggatcccgtttttcttcataatcagttccctcatttctcagtggtgtctgcactgtggtgcaaaagcgcgtccagtgcatcggatagtttttcagtcagctgctttttgtcctctatgggcttacccagcggggcggtggagggctgcggggctttgtcgttcaccggcttgcccagcagctccggttcggtctgctgggtggtctgtggcagccatgtgttcagctgctgcccggtgtgcaggatctgttccagcgtaccggcgcgccacagcgtcagcgccagaaccgccgccaccgttgccacagcagcgcgtccccatgtgttctgcatcagccgtatccagatggtgcccatcaccgcgccccgggcggagcgcggcggctgctccagcacatcatcggtcagcagggcggtgtagcggtccatgcagcggtcgcagtaggcaagatgctcggcggcttccagccgctgcgtttcgtccaattgcccgccgaccagtgcctgtaaaccttcctcactcagacagccttttgcgtcaaacagttccatgtacgctcctcctttcacagggtatgcggtcgttttgcaaaatctgctgcgccagcatctttttggcgcggtagacctgcgcttccaccgttttgggtgggcgtccgcacagccttgcagcttcggccatagtgtgctgttccagcagcaccagacggcagggcgtgcaatagggctcgcgcaggtttaagatcatctcggtaagctcctcttcgcccagtgcttccagcacctgctgctccggctgcatgccgggcggcgcgccctccagcgccagcacctcatcgccgggggtgttcatcttgcgcacccatgcgctgcgcagatagtccttggctttgttggccgcgatgcgcgccagccactgcttttcaaagccgggcgggcagcggtcgatggcccgccacgccgccagaaaggtctcctgcgtcagatcctgcgcctcctgcacatccggcaccagctggtggcagaccgtgtacacgagcgcctgatatttctgcaccatcgtgctgaattcctgtgttgtcaacgcgctgcacggcctcctttccggttttggatgcggtactctgcgccgcccttctgtctttaatacgaaggagcggcggcagttcctgcaaaaaactaaaatattttcaaactttttcttctgccgcagatatggtacaatagcagtatagcacacagggaggattttcgccatggcttctaccacccgtcaggcgcttttacaggcgctgagcgccgccgagggcgcgtatatttccggccagcagctggcgcagcagctgggggtcagccgcgctgccgtgcacaaggcggcagcggcgcttaccgcgcagggctatgcgctggaagccgcctcccgccgggggtaccgtctgctgggcggcgaccccttctgcaccgaggcggtaggcccctaccccgccccggtgcagctgtacgacacgctggaaagcaccaaccgcaccgcaaagctgctggcgctggaaggtgccgcccacggcacgctggtgctggcgggcgggcagaccgccgggcgcgggcgactggggcgcagctttgccagcccggcgggcaagggggtgtactgctcggtggtgctgcgcccgccgctgcccgccgccaacgcccagactgccaccatcggcgcagcagtggcagtgtgccgggcggtgcagatgctgtgtgggctggaacttgccatcaagtgggtgaacgacctgtattacaagggcaaaaaggtgtgcggcatcctgaccgaggccggtacagaccttgaaagcggccagctggaatggctggtggtgggcatcgggctgaacctgaccgccacggcggaggactttcccccggagcttgccgccaaagcaggcagcctataccccggcggccctgccccggtaagccgggcggcgctggcaggtgccatcgggcgggaactgttggcgctgtgcccgggctttgcctgtctggacgagtaccgcgcccgctgctttgtgcccggtcattgggtgaccgtgtgcaccggcaccgaaacctacgccgcgcaggcgctttccattgacgatgccgggcggctggtggtgcagcgggagggcgggcgcaccgaggcgctgcgctgcggcgaggtgaccatccgtcccactaagacggaataaacggatacaaaaagcccgccgggcattgcgcacggcgggctttggtttacagtttactctgccttggtctcgggctttgcctcagccttggcttccggctttgctgcaggggcagcagcgggagcggcgggcttcaccacgggcttcgggggattggggtcatccttcagcgggaacaggatgatgtgcttggggcacttctgggcgcacataccgcagcccttgcacttgtcgtaatcaatgcgtgccacgccgtccacaacatggatggcgtcaaacttacaggtgcgctcgcacataccgcaggcgatgcaggaggtggtgcacagcttgtttgccacagcacccttatccttgttggagcacatgaccaccggcttgcgggggccggcagcgtcgatcatgatgacctgcttggggcagatgttggcacaggcaccacagccggtgcacttgtccttgtccacctttgccacaccgtctacgatgtggatggcatcgaacttacacaccttggtgcagtcgcccagaccgatgcaggcgaaggagcaggtcttggggccgccgtacagggctgccgcagcagcacaggtctggatgcccttgtagtcgtaggcgggcttgcagtgctcggagctgccctgacactgcaccacagccttcttttctacggcgcttgcctcgccgcccatgatcttggcaatggcagcagcagccttggggccgccgggtgcgcacttgtcgcagggcacgccgtccagaacaactgccttggcgtagtcggaacagccggcgtagccgcagccgccgcagtttgcgccggccagacaggcagaaacttcctcaatgcgggggtcttcctccaccgccatgaactttgcggcagccaccagaacgatagcacccacagcgcccacgatggtgcacaggataacagcagatacaatattcatagtcctgttcctcccttacagcgtaacattgaacaggttttcgacgatgccgccgaagcccatgaaggacaggctggtgattgcagctgcgatcagggtgatgggcaggcccttgaagggtgccgggggatcgcaggcttccacgcgcttacgcacgccgctgaacatgaccatggccagcataaagccgcagcctgcgccgatggcacagatcagagcctcgatgtaggcgtagccgaagccgtgtgcagccacatctgcgccgtagtcgcccacgaccagaatggtaacggccagcacgcagcagttggtggtgatcaggggcagataaacgcccagcgagttatacagtgcaacgatgtacttcttgaggaagatctcgatgaactgcaccagcacagcgatgaccagaatgaacacgatggtctgcaggtagcccagaccagccgggtccagaatgaagatctggatggggaaggtaacggccgttgccatgaacatgacgaagatgacagcaccggacataccaacagcggaatccagctttttggaaacgcccaggaacgggcagataccgtagaacttcaccagcacatagttgttgacaaggatcatgctgaagaagatcgcagcgagtttgacgagcatcttattccgcctccttcttcagattgtcaagatcacagcagctcttgcgctcgatacgggcgtccagcttgccttccagccacacacagccggccatcaacaggccaaagcagaagaatgcaccgggagcctgcgtcatgatggacaccttggcaacgctttccggaatgatctggaagcccagccaggtgccgctgcccaggatctcacggatggaggccatcagagtagcggtgagggtgtagccgaggcccatgcccacgccgtccagtgcggaatccaccacattgttcttgcaggcgaacatctcggcacggcccagaatgatacagttgacaacgatcaggggcaggaacacgcccagagcgttgtacaggctttccatgtaggcctgcatgaacatctgcacgatggtcacaaagcctgcaatgatgacgatgtagcagggcagatgcaccttgccggggatgactttccgcagcagggagatcatgatattggagcacaccagcacgaaggtgaaggcggcgcccatgcccagtgcgctggaaactgccgtggtaacggccagaatggagcaggtgcccagaaccagacgcagaacagggttttctttgatgatgccgttggtaaggatgcttaccttggacttattttcttgtgccatttcttaccaacctccttttatgccagctcgttgaagcagttgatacaatcattgatggcagcaaacagagcggtggacgaaatggttgcgccactgtacgcatcgaaatcctgattcatcacaatgttcttggtgccgtccatgccgttgaactgtgccaggaagtcatcggtggacacattggagccgatgcccttggtctgggtagaagcgtctacccagatgccggtctcggcgccgttggcatcaaagcccatgatgacggtcaggatgccgccgtcaaagcccttttcctcggccttgatggcaatgccgccatcgggagcctttaccacgccggtaacgttggcggtggtgtagtcggtcacttcctccagcgtagctgcgtccgaaacagagggcatcacgctgacataagcagccagcgtggtgcggcgggtgttctccttgataacgggagcggtcatgccgttcaccagagccagcagcaggctgacgatcagagagatgacggtcagcacaacaatgggcttaccggtggtttcccagctggaatttgcagtcttactcatttgccagcaccctccttcgctttctttgcaggcttcacatagccatacggggtctgacgggtcagatcattgatgtacgggacccacaggttcatgaacagcagcgcgaaggacacgccctcggtgtagctgccccagtagcggatagcaaaggtaacgatgccaaggcaaacgccgtacaccagcttgcccttcagggtaaaggggctggtaacgtagtcggtagccatgaacacagcgccgaacagcaggccgccgctcagcacggcaaccagtgcgctgtgcagatccttggtagcgatcaggtagaacacgaacacgctgccaacgtaggaagcagggatagcgatgctgatggtcttggtagccaccagatagatcaggcccagcacgatagccagtgcgcaggtctcgcccagcacaccgccgtggatgcccatgaacagatccagcaggctcagcttggagggatctgccacagccagcggggtagccttggacagctggtccaccgctgcatccgggaacacccacttattcatggaaccggcaaagctgataaacagcacgatacggcccaccagagcggggtttgcaaagttcatgccaatgccgccgaacagctgcttgacaacgatgatagccaccagatcgccgatgatcagctgaccgatgggcatacccacgggcacgttcatggccagaatgatgccggtgaccacagcggacaggtcgctgatggggtttgcacgcttcagcagcttgcagtacagccactcaaaaaccacacaggccaccacagaaacggcggtgaccagcagggcgcgcacgccgaaaatgatcgcagaggcaaccacgcaggggcacagtgcaacgatcacgttggccatcaggctttgggtggtctcgtcactgcggacgtgcggggaagccgaaacaataagcttcgtatccattacttattgcctccttttttgatttcgccaagatagaaggccttggccagactcatcatctgggtaacagggcgctttgccgggcagacgaaggagcagctgccgcagttgaagcagtagtcagcgtgcagcttgcccagctcctgcacatcgcgggcggcgtaggcctgattgacctccacgggctccagacccatggggcagtactccacgcagcggccgcagcggatgcaggggttgacctgtgcgggctgtgcagctgccttgctcagcaggatcagaccggaagtggtcttggtggtggggtaggaaaggttctccacagcggggcccatcatggcaccgccggcaaccaccttgcccagctcgcccttgacgcccacatagtccagaatgtcctgataagcggtgcccacgggcacaacaacattctggggttttgcgcaggcatcgccgtccacggtgatggtacgctggaccaccggcataccggtagccagatacttgcccagcgtggaaacgctggtcacattcatcacgatagcgcctgcatcggcgggcagaccgccgtggggcacctcgcggccgaggcacttttcgatcaggatcagctctgcgccggtgccgtagacactgggcaggggcttgacctcgatagcgctgtcgtccttggtctttttgcacagcaggtcgatgcactcgggcttgttgttctcaataccaatgatgcacttcgggatgccggtatactgcagcacagccttgatgccgcggatgatatcatcgctgcactccagcatctcctgcgtgtcgctggtcagccacacctcgcactcggaggcgttgatcagtaaagtatccaccgactgcttgggctgcagcttcacatcggtggggaagcctgcgccgcccagacctaccagaccgcactcgcgcacggcagcaaggaagctggccttatcggtgacttccggtgccttgacagccgggtctacggtctgcttgccatcggtcttgatgacaacagaatcgcacatacggccattggacagacggaaaggttccactgcagctaccgtaccggaaacgctggagtggatgtttgcggagacaaagccgcccgcctcaccgatcttggtgccgacgaacacttcatcgccttttttgaccagagccttggcgggtgcgccaatgtgctggctcataaggatacgtacctgcgcgggcagaggcatcgggataggtttgcttgcagcagttgccttgtcatgcggcgtatgcgcgccaagcgccgcacgtttcagcttgttcaacatggatttcaaatcccccattctgcttgaattgccatccccacgcccatgcaggcgcactggtacagggacagcagctgcttaacacacttattgtatcattttggcgcgggaagtcaacgacatcacggctcaaatgatgaattttcctgaactttcttattcgttttcgcagattagttttagctaactgtcgtatttttctttttgttctccctcttctgccgtttgcctttactgtgggaatatgctatactatacctaacatgacaggcggaacgtcccccgctccgctcccgaacttcacaaggaggcaccaaaccatgaaagttctcaaagctctgctcgccgtcctcaccacactggctgtcgccctgaccgccattctgctgctctggcaggataaaagcgccccgcgctatatcaagatctacgaaaacgagcagtaatatttttcttgcaaaaacagcaccccggccaagcggtaaaaccgcccggccggggtgtttttgcgttatccggcagaccacacaaaaacgccgccgacttttcgtcagcggcgtttgctcgtatcagtaggtcatcacgaccaccataatggggtattcatccctcgttttggggtcggtgttatgcacaacgcccacgcccacaagggtggcttccgtgctcgtgaccagtgccggtttccatttgccggtgtcctttacccagccgcggatcacgctctctgtgggatacgcagcgtagccgcctacgcccaccagctttttatcctttaccgtcagcttgctgatgtcgttccagtccttcgtataccgctcgccattcgggtcgttgctgtactggccaagcagccagtccagctgcaattttgccattttttcagccatgacacaggcgtcggcgtccatggtcagcggggtgttattgccgttgttcttgcgcactgtgttcagtgcttccaccaccgcagccaccttctgcgcctcggtcttttcgtcggtggggtctttgccggtctcgctgctgcccggcttatccggcgtatccggtgcggaagggccggagggcccgcaggctgctaaaagcagcagcgccattgcagctgcaagagccgctgccgtccatcgtttccaaagcttcatctgtggtcccccgctttcttcttatgggagcgcgttgctccccggtttcatcttatcccctgctgcggcgcgctgtcaatgggcagatgcgccaaactttgccagaaagtttcggaatagcgtgcaaaagcaggaacataattccggaaaatctgccgattttccggaattgctttttcaccgggcacactgcgcgggcttttctgcacgcaaaaaaggctgccgcacagcctgtgtgcggcagcccgagatatatcaagttatgctcggagtagtcggcgtataggtgatcaggatcaggatatagttctcatcgccgatcttgtgcgtagctgcgccgatctcgaccttattgtcaccggggcgggacgtgccgatgggaacaaactggctgggactcgtgacgctcgccatccattccatcttcagatgctcgcctattatgccgctgctcttgaactgaatgttgtcgatcaggttgacctcgcaaggcgttttttcggggtcaatcccggctgcctttataacagcaggatccttcagcagctccttggcctttgtgccctcgttttccttctgcgcggcggctgtatcggcggctgccagcagcgctgctgccagatcatctgcctttttggtgtgggtcacagtcttgcctctgtctgtcatataatcgatcgatattttcagcagctcgttctgcatggcgtagctattgccgccgcagcctaccatcgttaatgccagtgcagcagccagcacgacggctgccaattttttgaacagtttcatcgtttcctccttgccgcagcctgcaataagtctgccggggcagctgcaggccgcatcttgtaaatataccgttccggtcttgggcatccgtaagggctgtcacagcccggacgctcttatttcgcgatcataagcacgcagttcttgccgtcaagcgtgccaatggcaagaccaaactcaaatttgcttccgagcttgggttcgccgatcttcaaatcaccctgcatcagacgatacagaagatcccctgcaatctcaaaaggcttagcctgattcatggtattgctgaggtaactcgggttgcgcgtcaaggagagcgcataagcctccgttgccgggtcaatgccgacctttttcaggaactcctcatcattcagcagtacattcggatccggccactcgccttcttccgactccgcgagggctttatcgatctctgtcagcagctttgctgccaaggcatccagttccttgctgtccgtggcctgcttgccctgcataataacagcagtatccgagacagcacccttgatctgccgggcaaggactgtctcggagccgccgcagcccaccatcatcagtgccagagccgccaccagtacggcagctgccagttttttgaacaatttcatgcttcatgcctccttcttcgtcagacactatcctatgcggcccggacgtttcccaagcctactttccttcattttaccgtcacatttgcaatactgtcaatgcacagaagccctaaagtttttccagcaaatttcagcaattcgcgcaaaaaaaggctgccgcacagcctgtgcagcagccttttgggcttagtaatcgttttcgcagccaagcaggaatttcatgtaggcaaaggtgcgttcccgcccgaggtcccgcaccatgcacagcagcttttccagcagcgcccgggtctccgggtgcatcaggtagtgatccttgctgcgctggtagtactcccacgcggaggcatcggtgtacttgtcgcccagatagatctggcttgccgccacccggtcgcacaccatctcgcagacgtagcgcagggggatcttcatgccggtcaggccggtcttggtggtgctgtaatcgatccagtattccagatgatgcttgttgcgccccttgtggtgcagccacgccgaggtgtagcccttggctgcgcgctcggcctcgttggggctgtggtcgccctgataatagatgcacccggggatgaactcggtggggctgtacttgctcaggtcgtgggcaagaccctgctcatacaacccgcattcaaagcagtatttcatcaccagcagcttgtgccgggtgatagtctcgaaatgacctttgatgttcatgctgttattccctccactgcaccgtgatgcgtccctctttcagcccgcgcagatcatcactttcggaaaaatcctcccggtccatggtcaggttggggttgtagtaggggtcatgcaggatgttcgccttgccgtgcacctcgtacaggcgctgctgctcggcggcaaagcgccgtgcctttaccgggtctttttcgtccccgccgcggctcttgctctcgtagtgggtcagctgggcgtagggcgtccacgcaatgcgatagcccgcatcccgcacccgcaggcagaagtccacatcgttgaaagccaccgcaaaggcttcgtccaacccctttacctcgtcccacacgctggtctttaccagcaggcaggcaccggtgacggcggaaaagtcctgcaccgtggcggtgcggaacagatacccgctgccgccggcctttttgtacttgtggctgtgccccgcgtagccccccagcccggtaatgacgcccgcgtgctggatggtctcgtccgggtaaaagagcatggcaccgcacactgccgccccgccggggtgggcgcattggcgcagaagttcagtgagccattcgccgctgcgcacctccacatcgttgttcagcagcagcagatactcgccggtggcatatttgcggccaaagttgttgatgccggaaaagttgaagccctttttcgggtaggtgaccacccgcagaccgtcatagcgctgctgcgcctttttatagtaggcaaaggtggcggggtcggtggagttgttctccaccacgatgacctcaaagtgctcccattcggtctttgtccagatgctgtgcaggcacttttccagatcctcggtgtggtccttgttggggataaggatactcacctttggttcgcccacgatgtcccacttcacccggtaggtgctggggaacaggccgtcctccaccgtgccggtgcgcccggtgcgggtcaggtggtctgccagcgcctttttggccgttgccgccacatagggcttggcgtctgcaccgccggaggtagaccccgcgtgcacccgccagtagtagagcacctgcggcacatgggcggcaccgccggtcttttccagcagacgcaggaacagatcatgatcctgactgccgtcgcattccgggcgttcgccgcccagctgctcccacagcgctttttggaacaccgccagatggcaaatgtagttgcagcacagcaggtaatccggggcgtagtccggcttgaagtgcgccaccatggggcggtggatgctcttggtgaacagtgcctcgtcgctgtataggaagccgtccggctccccgcgctgccgcagctgcaggatggccttacccatggtgtacagggcatggggtgccagaatgtcgtcgtggtcagccagcgccagatattcccctgtcgccagctgcgcggcggcgttggtgttggccgcaatgcccttattttcgatttttttgtatacgatctgttgattcttttgctgatattcctttacgatccgtcccacgtccccgtgagcggcgtccgaagcatcggcaaggcagagctgcccgttgggcgcggtctgccccacaaaagaatccagaaattcccgcaggtatttttccggggtattatacagcggggtcagcaccgagatggtgggcaggccgcagtctgccgccgttttgccggccatctctgcacgctgggcttccagcacctttttggcgggcaggtagcgcgcacgcttgccaaagcagcggcgctttacaaagcccgcgcctcgtttgaccatggtgggcaggccctcttcctttgtcagctgcacggcatagccggccagctccttggcgcgtttcaaccgtacattcatatcagacctcgccgcgctgggtcgccttgtaggcggcgcagactgtctgggtatccccgttcattttcaggtggccgtggctcagccatgccaccttggtgcacatccgctcgatctgctcgatggagtgggacaccagaatgaccgtggtgccgcccgccatcagctcctgcatccgcttttcgcacttctgctggaacaaaaaatcgcccaccgacagcacctcgtccgcaataaggatatcgggctttgtaatggtggcaatggcaaagccgatgcgcgccaccatgccggaggagtagtttttcagcggcacatccagaaaattttccagttcgctgaattccacgatctcgtcaaatttttcgtccagatacttgggcgagaagcccagcaccgtgccgttgaggtagatattctcgcgggcggtcagatccatatcaaagcccgcgcccagctcaatgagcggggcgatggtgccgtttacggtcaccttgcccttgctgggcttgtacaccccggcaatggtcttgagcagggtggatttgcccgagccgttcaagcccacaaggccgtaaaaatcgccgggcatgatgtccagactgacgtcctttaaagcgtagaactcgtcgtattgcagccgtccctgcaccatggccagaaagtactccttcaggctctcatgcttttccttggaaaggttgaagcacatggaaacattgtccactttgatgatcggttccattgttcaccctccttaaatgtgcagcacaaagtggtcctgcgttttgcggaacacctgcagccccactaccatggacactacggcgcagatgccgcagacaaggaacatatttacgtccagcgggatgccccacatcaccgtgcggcggaagcctgtgatataccagtacatggggttcagcttgatgatctgctgcatattgaacccgccgatggaaaaggtcatctgagtggggtcgtagaagatggcggagaaatacagcagcgcggtgacgaacacgctccagatatgcatgatatcccggaaaaacacggtagccgccgctaagaacatactgacgcccagactgaagaagaacagagtcaccagcgggtacagcgcctcgaaaatggtcaggtggaagggtgcgccggtaaagatcatgaccagcagcagcgccacaaagctgaagatgcagttcaccatggcaaagcagcatttttccagcgggaagatatacttggggatatacacctttttcagcagcggggcggcgctgagcacgctgctcatgctggtggaggtagcctcgttgaagaagttgaacagcagctgaccgcacatcagaaagacggcaaagttgtcgatgccgctgccccgcatatccatcaggctgctgaacaccgcccagtacacaaggcacatgagcagcgggttcaaaacgctccacaccacgcccagcacgctgcggcggtatttcagcttgaaatcacggcttacaaggttccacagcagatagcggtagcgccagaagccgttccacattgctttgagttttgccacgggcgatcaccacttttcaaaatactcgaacttctgggcggcaaagggctcgtgcagcttgtcctttgcgctggtcttgtgctcacagccgcagtccggccactgcacgttgacggtggggtcatcgtaggggatgccgccctcgctggtggggtcgtagacatcggtgcacttgtagcagaactctgccacatcgctcagcaccagaaaaccgtgggcaaagccctccgggatatagaacatcttcttgttgtcctcggaaagggtcacgcccacccacttgccaaaggtggcgctgtgggggcggcagtccacggccacgtcatacacctcgcccttggtcacgcgcaccagcttgccctgggtgtggttcttctggaagtgcagcccgcgcagcacgccccgggtggagcggctctggttgtcctgcacaaattccttgtcgataccggcctctgcgaactggtccttctggtaggtctccataaaatagccgcggtcgtcgccgaacacctgcggctcaatgaccaccacgccgggaatctcggtctgcgtaaaaataaacttacccatgatattgtacctctctttttttctgaaagctttttctttatctggaaaagtctggttttgaacaggcttttacgcttttttatggtgccttgccgttttgcggcgcttttttaggcgggaatgtacccgcagcaccagtacggtaaccacggctgcacctatggtgcaccccaccgagatgcccgccagcagccatgcgctgctgcccggttccacgtccctggcggcttccagctttgtgccgacgctctgctccagcagttccgccagacctgtgatctccgcctttacccgcacgctggtgctctcctgctgcgcgccgccgttcaaggtgtacaccgcatacacggcgggctctgcgccaagcagatactgctccggcagctccaggtccacggtcacatcctgcgcggataagccctcggccagcagcagcttcaccccggggtcggctacggtaacggtgccaaggctctgcccgccgcccgccacagccagctgtgcggtgaccgtgccgccgggcagctgggtgtagcttttataggtggaaaaggcgtagtccagcagggtgcgcatatcgttatatttatcggtgctcagctggctttgcatggtcgcgcagatcagccgcaccccgtcctgctccgccagacagacatagctgtaccgggcggtgttggtatagcccagcttggagcccagcacactgtcgatatggtagcggctggagccgatgcggatcttatcctgctgagagaagtagcgggtcaccggctggatgttggtgggctgcatggtgtacatctcgttgcgggtgaacaagtcctcaaaccccggctgctgcagcgcccagcgcaaaatctgtgccatatcgtagcagctggtgtagtggtcgtcgtcgctgatgccgtgggggtttgaaaagtgggtgtgggcaaggccaagttcctccacctgtgcattcatggccgctacgccgtccgcgatggtgccgccgccgaaatactccgccagcaggttggcgccgtcgttggcgctggccatctgggtggcgtacagcgcatccaccaggggaacttcttccccttcccgcagggcaatatggctggaatccgtgcccgccagcgagtagacgtcctcgtgggtcacggtcagctttacatcgtcccagtccccctgcgccttctcgcaggcaagaccaagggtcattactttggtaatggaggccgggtgcagttcctcgtccatattctgctgcgccagcacaaggccggtgtctgcatccatgatgcagtatgcccgggtattggccagcgccgggccggctgctgctgcgccgggcaccagcacagcgcctatcaaaagcagcacagtgcacagtgctgcggtaaattttttcatctggtattctccgcttatccgttttatgccagcaagacatcatttgaagtataccacattttttccccgctgaaaagagatttacgcattcctttgtcccagcagcaccggctgcagctgctcgccccgcaaagcggcgtccacggcggcgggcaacagggcaaggtcggccttcaggctctggggcttggcaaaggggtcgtcctgcccgtagggcacaaagtaatagtgcttgcgctggcacaaccgcgccatattttcgccggaggcgccaaggccgtcgttggtagagactgccagcaccaccgggctgcccacccgcagcaggcttttggcggcaagggtcaccggcgtatccgaaagtcccgccgccagccgcgccagcgttgcgccggtgcagggggcgaccaccagcgcctgcgccagccgccgggggcccagcggctccaccgcctgcagggtgtccagcaccggctgcccggtaacggcctgtaagcgctgccgccagctttccccggtgccgaaccgggtatcctgctgcacggcaaagctcatgacgggcagcagcgtccagccctgtgccgtcagtgcctgcgccgcgcccaaggcgtcctccaacgtgcaaaagctgccgcacaccgcaaaggcaagacagccctttttctctgtgatcatattgttccctcccgctcctgcaaaatggcttgcaccgtgcgcgccagcgcctcccctgccgtttccggtgcccagaccgtcggcaggctcagcgcgtgcagcgccgtgtgccccagccgccgggcggcggcaaagtccgtgccgccgggctttgaggccagatccacgatcaggcatcccttcggcagcgctgccagcacttgcgctgtcagcaccggcgcggggatggtgttcaccaccgtatcaaaggcggcagctgcggcggcaaggtctgtcagcggcaccgcaagcagacccagttcctctgccatggcccgctgcaccgggcggcgtgccgccacggtcacccgcgcgcccagtgccgccagccgcaccgcaagcgcccgccccaccgggccaaagcccagcaccagcaccgccgcgccccacagggtacggctgcgccgttccagcagaatgccgatgcagccctcggcggtggggatggcgttatacacggtcagctccgggcgggcaaagtaatccaccagttccacccccgccgcccgggcgatagtccttgcgctatccgtcaccttaccgcccagcgccagtgccccgggctttgccatgcccagcagctgcgccagcggcagaccaggctgttccagcgggagcggcagcaggatgcagtctgcctgcggcagctgctgcacgccgcccaccgtataccccgcccgcgccaatgcacgccctgccgccgcctgccgggcatcgctgcccaccaccgcaaaccgctttgtctgcctcatgtcgtcatctccccttttccgctgtgcaccatcctatgcaggaagaggaaactgcgtgagcgggaaagatgctgaccggcagaaacaaaaaagctccccctttcgggggagccgtcatcgcacagcgatgactgagaggattcttatttcagcgcttcttccagcaccttcagcaggtgcgggatatccagcggctttgcgatgtggccgttcatgcccgcattcaaggcgttctgcttgtcctcttcaaaggcgttggcggtcatggcaaaaatggggatgcccgccttgcgggggtcgggcagggcgcggatacgccgggtggcttcgtagccgtccatccgaggcatctggatgtccatcaaaatcaggtcgtactgcccgggcacggactgttccatcttttccactgcttcaacgccgtctccggcggtatccacaaggaagcccgcttcctttaagatttctatggcaatctcccggttcagggcgttatcctccaccagcagcaggtgcttaccgtcaaagcttgccttgggctgcggggcagtcgtctgctccggttgtacccggaagggctctgccagcaccttgcgcagctccgagaggaagagcggcttttcgcagaaagcggtcacaccggcggcgcgcgcctcctcctcgatatccgcccagtcgtaggcggtcaggatgatgatggggcaactgtccccgatgaccttgcggatctgccgcacgatctcgatgccgttcatatccgggatgagccagtcgatgatatacacgctgaaagcatcgccctgctccacggcgtacttggtgcggatgaccgcttccttgccggagatggtccactccggccgcatgccgatcttggaaagcatggtactgacgctcaggcaggtgttggtgtcgtcgtccgccaccagcgcccgcagcccttccagctggggcagctgcttgatctccgccttctgcccgctgaggggaaagcagaggttcacgatgaactcgctgcccttgcccggctcgctttcaagggtgatggtaccgcccatcaggtctacgatattcttggtgatggaaaggcccagacccgtgccctggatgccgctgacggtggagctttcctcccgggtgaactcctcaaagatatgcttctggaactccttgttgatgccgatgccgttatccttgatgcggaactcgtagttgccgcagcccttgggcgcgccgggcttctgagcaatgcggatgctcaccatgccgccggtgggggtgaacttgatagcattggaaaggatgttcagcagcacctgattcagccgcagcgggtcggtgatgatatcctcgtccaccacatccatggtgtcgatgaacagcgacaaccgtttggaactgatgttgggctggatgatggagcgtatatcgtgcacgagatccggcagatgcaccgccttttcctcgatcttcaccttgccgctctcgatacggctcatgtccagcacatcgttgatgagggagagcaggtgctggctggaagtggagatctttttcaggtagtccagcacctgttccttattatcaacatgggtcgccgccagcgaggtgaagccgataatggcgttcatcggggtgcggatgtcgtggctcatgttgaacaaaaactcccgcttggcgcggtttgccgctgcctcgtgccggacggcaagctccagcttgcggttctgctcttccagctgggcgtgatacttctgctcctgctcccttttttgctgctccgcaagcttcatggagcggcggcgcagcgtttgcagcactgccacacagatcagatagaagatcagtgccgtcagcagtgcgctgctgaaattgcggaacaccgatttttcgtcgatatagagatacagatcaaaattctgtccgttgctgtacatcccgaaatagcagccggaatttgcccagtcgcgggtgtgggtcagaatgtcgggcgcaccggccttgcggatgccctgcaccagcgggctgttcgtggtgtacagtccgatgaggctcgggtcgtttgcggcgatcaccttgttgtcctgcacgataaagatggtgccgctgatgttcttcgggtagccgtccagcacgctctggatggacagggctgtcccctccacaaactccggcggggtcacccggtacgccagcagcacagcgtcccctgctgcggcgcggcgggtggcaacatccaccgctgtaccatcctgtaacagaatgcgcttgagataggtcttttgcgggttttgcagcacgttcagcgcggcttgctcccgcagagattccgcaaactgcgcatagccgatattaccatccgtatattcgcacagtgattctccattttcgtccagcacggcaatgccggtaagccagagggattccgtttctttccggagggcttcggggtcgtagagatccagagcgtcgttttcagccagctgccgcaccgagaccgccatccggcgcagcgactttgcagtgatggtatcgttatatttttcgtagctggtggactgcacttttacaaagttgatggtgcggtcaaagtattcctcggtagcgcgtatggactcccgcccggagaagagggtcactgccagcaaaagcagcacgcccatcagcagatagagcgccgtcacccgcatattgggcgtgaacggtttcttgttacggttcaagggcgtccacctccagatatttttccgggtccggcagatatttgcctacgatctgcttcatcgtgccgtcggcgcgcatggcggcaagggtctcggtcagcttttcgtccagcccgcgggtgtcgttcagcgcaaaggccacgccgatgccggtgaccagcagcggctcctccagaatgcggaaattggcattgcaatcctgcatataccgcaaaatggcggcctcgtgggcggcaatggcatccacatagccgcagttcagcatagcgtactgcacactgcggtcctcggcgctcagcagttcaccaaactgcgggatgcgggggtcggtgccggcgaggaagatttcctccggcttggtggtgctttgcaccatcatggtcttgcccgcaaggtcggcaagcgtttcaatgccgctatcggcattgaccgccaccacctgacggctgaccatatacggccctacccagcggtacagctgctcccgcccatccatggaaaagcagctccagatgcagtcaatggcgccgctttccacaaggtttgttttctgctcccagtcaatgatttcaaaccgtaccgcataccccatgcgggcaaagacctcggtggcaatgtccacatcaatgccggtgggcgtgctgtcattgttcaggtagataaaaggcgggtagttatcgctgcccaccgtaagctcgggcagcgctgccgccgcctgtgttttgccgcaagcggtcagcccggctgccgctgccgccgcgcacacctttaaaaaggtgcggcggggtattttatggttgaatcgctgttctgtcacgcgtagttgccctcacattaccattgtaaaatttcctgcttcagttccccctgcacgtccaacagacactgcagcagcagcgggttgaaggctccgcactcgccgttcgtgatcatctggacagccgtctcgtgcgggaaagcctttttatagcaccgttcgctggtcagcgcgtcatacacatccgccatggagaccagctgtgcgctgatggggatatcgtcgcccttcagcccgtccgggtatcccctgccgtcccagcgctcgtggtgccagcgggcgatctcgtaggcggtctgcaacagcggctggtctgcaaagctttcagtcttttgcagcatctctgcgcccagcatactgtgggtcttgatcaccgcaaattcctctgcggtcagcctgccgggcttgttcaggatggcttcgtcaatgccgatcttgccgatatcgtgcagcgccgacgccagcgggatgttatcctgctgctcgggagtcaggtcgtagcggctggtcagctccatcagccggtgcagcagcgtctcggtgatgatacggatgtgccgcacatgagagccggactcgccgttgcggaactccacgatctggctcagcacgcccaccagcacatcggtgttcttttcccgtgcgcggatctggtcagacaccatctgcaccagccgccgctgcttggcgtacagcttgatggtgttggacacccggcggtagacgatctttgcgtcaaaggggcggttgacatagtcgctggcacccagctcgtaggccttgcggatggcttcctccgaatcgtcgctggagatcatgatcaccggcacgtcctcgatggtgtggttggtgttcatggtgcgcagcacctcaaagccgtccatgaccggcatattgatatccagcagcaccagcgagatctgcccggcgtttgcccgcagcagctccagacactgcttgccgttctcggcttccagaatgcgatagtcctcgcccagaatgccggcaagcatcatgcggttcatcatggaatcgtccaccagcaggatcacgggcttttcccctaagacatccttctgtgcagccaaccggctgtcctgtgtgtccaccgccacggcgtccttgtggtttttggcctgatacattataaaatctgcccggcgcaccacgttctctatagggtcggcaagggtctgcatcgcgccgccgatgctcagcgacagccggaaatgggggtagcccggcaccaccgtttgctgcacggcggtgcggatctgctccagctttaccttgaaataatccgccgggatgccgggcagcaccagcaaaaactcgtcgccgccgtagcggatcagcagatctgtttcccggatgcagctgcggatggcctttgcaacggtttccagcgccagatctccggcgtggtggccgtaggtatcgttgcagatcttgaaatcgtcgatatccatcagggcgatgcccgccgggccgaggttattgcgcaccacatcctcgtaatagcggcggttgtaggtgccggtcagggcatcgtggttcagccgctgccggtagcgcttttctttttccatgctccgggcagtagtctgggcaaactgcgccttctgctcctccatctgctgcatcatccgcagcagattatggttggcggtttccagcgcctcccgctgggtacggttctgctgttccagcttttcccgcagttccatatagggggtgatatccgtgatcgtgcccacgatatagcctttgccgtaccattccacctgattggcagcgttggtgacccagcggtagccgtttttgcccagaatccggaagatgctgtcaccattcttggcgtaagtcgcgctgttttccgcattccggtagcgcagcccggccgccagatcatccgggtgtagcagcgctgtatagcggttatcgaaccttgccgcaaattcttcccgctcccagcccagtatctccagaaaacggtcactgacataagcaaacggatagccgttttcagggtcctctgcgcagcagtgaaagccgcccggtatattctgtgcatagcgttccagccgcagaaatcctttttttattgtctcgtctgtttccattttacctttcctgcctttttctccgcgcattgcagcacgcagtaccccctgttaccgcaatttcaaactttaccttcctgtacgccccgcttttgggcatactgtaacattttgattctatcatcaaaactgcctagatgcaagcattttttgccaatggaaaggcaggtaaggcaacgcaaaaaagccgccgcacaaaaagtgcagcggctttgcggggtgtcacatcacagccagcgctcagagatgatccaccacataccgggcaggttgatccgacccagcagatgctccaatacgatcagcatggtattctcctttcagaccgtccgtttcagccgaacagccccttcagtaaaaacagaagcagcttagtaaagctgccgccgcccaaaaggctgagcagcggcccaaggccttgaaacatggaaggtttgctcctttcgtttcattccgtcccgactgctgccgggtgccggtctgccttatatacgaaccagtccgccgcaggattgcaaatgccatggtggtaaatattgggagtattgcagctgccgtctgcctttacgaccccttcccgtgaaaaagttgctcagaaacgcccgcaggcgtttctgagcaacaaatcaaaaatactttttccgctgaaaatgcccaaagcagcgcggagggcattccaaatcatcttacttaaaacgcttccatgccggggtagacggcgctttcgcccagctgctcctcaatgcgcagcagctggttgtactttgccacacgctcggtgcggctgggcgcgccggtcttgatctggcaggtgttcagcgccacagccaagtccgcaatggtggtgtcctcggtctctccggagcggtgagagctgatggcgttgtaaccggccttgtgtgccatcttgatggcttccagggtctcggagacagagccaatctggttcagtttgatcaggatagcgttgcccgcacccagctggatgccctttgccagacgctcggtgttggtcacaaacaggtcgtcgcccaccagctgcaccttgccgcccagctcgcgggtcatctgctgccagccctcccagtcctcttcgtccagaccgtcctcgattgagatgatggggtacttttccacaaggctcttccagtgcgcgatcagctcggcagaggtgaactcggtgcccgccttgggcagcttgtaaaagcccttgcccttggggctcttccactcggaagcggcggcgtccattgccagcataaagtccctgcccggcagatagcccgccttttcgatggcagccagaatggtctcgatggtctcctcatcgctggaaaggttgggtgcaaagccgccctcatcgcccacagaggtagccagacccttggacttcaggatgccagccagtgcatggaacacctcggcgcaccagcgcagcgcttccttaaaagagggtgcgcccaccggcatgatcatgaactcctgcgtgtccacggtgttggcggcgtgtgcgccgccgttcaggatgttcatcatgggcacaggcaggcggttgccgtttacgccgcccagaaaacggtacagcggcatttccagcgaagcggctgctgcgcggcaggctacaatagacaccgccagaatggcgtttgcgcccagattggacttatccttggtaccgtctgctttgatcatggcggcgtcgatggcgtaaatgtcggaggcatccatgcccaccactgcgtccgcaatgaccgtgttgatgttctccaccgccttggtcacacccttgcccagatagcggctcttgtcgccgtcccgcagctccagtgcctcaaactcaccggtggatgcgccggaaggggcacagccgcgcgccacggtgccgtccgccagcgtgatctcggcttccacagtggggtttccgcgggagtctaagatctcgcggcctacaacagcttcaatttccagataattcatcttgaaaccctcctgaatatcattttctctcccataccgcccgggcgggcagatggggaactgctctatttaggtagttatatacaactaaccatcaatatcctaccacgctttgcaccccggcgcaagagccggtgcgtatgtttgcagacctaaatttttaacgggaacgcaaaccgccgtggaaaacccgtttacagtctgccctcttgcggcagcggggatacgttatgcttaccatgtgttttttatatggcagatatgccaaaaattttctttactttttggcgattcggttctatactggttgcggcatttacgcttttttcccatttatagtcgttatagaggaggatttttgcaatgaataaggatctgacggtgggcaagccgtcacaggtattgtggcaattctgtctgcccatgttcggcagcatcattttccagcagttgtacaacatcgcggatagtctggtagcgggcaagttcatcggtgagaacgcgctggctgcggtgggcaacagctacgagatcaccctgatcttcatcgcctttgcctttggctgcaacatcggctgctcggtcatcgtgtcccgctactttggcgcaaaggaataccgcgagatgaagacctcggtctacacctccctcatcggctctgccgtgctgtgcgccgtgctgatgggcatcggtctgtttggctgcgacgccctgctggagctcatcaacaccccggaggagatccttgcagattctgcgctgtatctggatatctacgttctgggcctgcccttcatgttcttctacaacattgccaccggcatcttctctgcccttggcgacagcaagacccccttctacttccttgcagtctcttctttgtccaacatcggcgtggacatcctgtttgtggcaggtttccagatgggcattgccggtgtagcatgggctaccttcctgtgtcagggtgtcagctgcgtgctggccatggtggtggtgttccgccgcatccgcgctttccacaccgagggtcatgtgcagctgttctcgtggaatatgctgggcaaggtggccgtggtggctgtgcccagcatcctgcagcagagctttgtctcggtgggcaacatcatcctgcagagcatcatcaacacctttggcgccagcgtcattgcaggctactctgccgccgtcaagctgaacaacatggtcatcacctcctttaccaccttgggcaacggcatctccaactacacctcccagaacatgggtgcaggcaagatggaccgcgtgaaggagggctttggcgcaggccgcaatctggtgtggctgctgtgcgtgccgctggtggtgctgtacttcttctttggccgctttttgctgctgctgttcatgaacgacccgcagggccctgccattgacaccggtatgctgtttttgcgcatcctctctcccttctactttgtggtgtcggtcaagctggtggcagacggcatcctgcgcggctgcggcctgatggtgcggttcatgatcgccaccttcaccgacctgattttgcgcgtgggcattgccgccgtgctcagcgccaccgcgctgggctccaccggcatctggatggcatggcctgtgggctggtgcatcggtacggcgctttccatggtgttctacgtcaccgccatccgcaaggcactggcagagccggtggctgttgccgaggccgagggacaggccgccgaagtccgcgccgaggccgaatttgccgccgacgccgagatggaaaccctgtaaccattttgcaacttgtgaatttgtttcatgtcgcagataaacaaaatgaacaatttgaaatagtgcacaaaatcacgctttaatttttgtataaagtatcaacaaagccgagaaaatgcgcccaaaagtatggacggtttgtgaattgcggatttgaacccagatagctataataacagacaagaacagaagcaaggccgctttagaggggaagggccttgcttccgtttttatcaatttactttatagaacactccggaggaggagatttttatgaaaaagatgatcactcgtcgtcagttcatggctgctgccggtgttgttgccgcagcaagcgctctgactgcctgcggcggttcttccgcaagcacggccgcttcttctgcagccggttccgctgctgcttccggcagcactatcaaggtgggtgtgatgggccccctgaccggtgacgcttccgtttacggtcaggctgttgtaaacggtgccagcctgtacatgaagcaggtcaatgccgatggcggtgtcaacggcaagcagctggagatcatcgccatggacgagcagggcgatgaaacgcaggctgtgacctgctttaccaagatggtggatcagggcatcaccgctctggtgggcgatgtaaccaccgctcccacgctggctgttgccgccgagagcgccgattacaatatgcctatggtcaccgcttccgctactgccgaggctgttacctacgatgccgagaccgacaccgtgaacgggaatgtgttccgtgcctgcttcaccgaccccttccagggcgtgaagatggcagattacgcttacgagaagctgggctacaccaaggcagccgtcatcttcctgaagggcaaggactacaacgagggtctggccgagaactttgccaaggagtttgaggcaaagggcggcaccgtcgtggatcaggagagctactctgagggcgacgtggacttcaagacccagctgaccagcatccttggcaagaaccccgagatggtgttctgccccaactactatcaggaagtgggtcagatcctggctcaggctgagagcatcggcttgaccgttcccttcctcggcggcgatggctgggatggtctggagggctacgccaccgctgaccagctgaaggactcctacttctgcgcctgctacgctaagggctccagcaccgcgtttgaggatgcctacaaggccgagtacggcgaggcctaccccaacggttttgcacccttgggctacgatgcagccatgaccgtcgtgtacggcatcaaggcagccgaggagcagggcctcgaggccggctccgacgagtacaagcaggccgtcatcgatgccattgccggcggcaccatcgagggcatcaccggcacctttaccttcgacgagcaccacaaccccgtcaagagcactgccatcctgacctatgtggacggcaagcccgagctgaaggaaatgttctgatccgcgctgttccatccaccggtgatggagccgcccgcacagagcaaaccccatgatttttttggagaacgccggaacagcttttttctggtcaggcgttctccttttttataacaatttactggcaagccattggccgccagcgccctcatccggcgctgcgcgccaccttcccccggccggggaaaggcttcagatgcgtcatcgcatctaaaaaagtgtatccaacggcgtataaacgccgcaaagaaaggaagtatccaaccatgacagtgttctttagccagctgatcaacggcttgtcccttggcagcatctatgcactgatcgcactgggctacagcatggtgtacggcattatcctgctgctgaactttgcccacggcgatgtcatcatggtgggcgcatacatgtcctggttcgtcatgaaccagctgggtcttggcccggtcaccgctgtgtgcgccaccatcatcacctgtacgctgctgggcgtggtgatcgaaaagatcgcctacacccccctgcgcagcgcaccccgcatctcgctgctgatcaccgccattggtgtctccttctttctggagtacacggcagagctgatcctcggctcgggtgcaaaggtgatccccgcctactacaccaaccagaccttccgtctgggcaaggtgccgctgggtcttacctccatcatcacgctggtggtcaccgtgctgtccatgctggtgctcacctttctggtgcaaaagactaaacttggcaaggccatgcgcgccgtctcggaggatatggatgctgcccgcctgatgggcatcaatgtcaacagcaccatctccttcacctttgccgtgggctcggcgctggcgggcatcggcagcgtgctgtactgctgctcctacccgcaggccacccccaccatgggctccatgctgggtctgaaggccttcgtcgccgccgtgctgggcggcatcggctccatcccgggtgctatggtcggcggcatcgccatcggcctgtgcgagtgctttgtttccgccatcggcctttccgcatggaaggacgctgttacgtttgcaattctgatcatcgtgctgctggtcaagcccacgggcttccttggccgcaaggtgcaggaaaaggtgtaagggggcataacgatgaataccaaacgcaagaccctcaaaatgcccgtgcgctacctgatgaatctggtgctggtggggctgctgttcgtggggctttcctatgtgaccggcaatatgctgtccacctaccagaataaggtgctgctgaccgtgggcatcaatatcattctggccgtctcgctgaacgttgccaccggttatctggggcagctgccgctgggtcacgccggttttatggcggtaggtgcctacgcctgcgccctgttcaccaaatcttccaacctgcccaagggcgtggcctttgccatcggtctggtgctggcatgggtgatcgccgggctgttcggggtgcttatcggcatccctgccctgcgcctgaccggcgactatctggccatcctgacgctgggctttggcgagatcatccgcatcaccttgaacaacattgatgatgtgctgggcttcaagctgttctacggctccaagggcctgaagaacatccccaagtattccaactttaccaacgtatttctgtgcgtggtcatcacctgtttcctcatccacgccatgatgaagagccgccacggccgcgccgtgctggccatccgcgacaacgagatcgccgccgagagctgcggcatccagaccacctattataaggtgatggcctttgccttctccgctgcctttgcaggcttggcgggcggcctgtacgcctgctacatcggcgtgctgaacccctccaccttcggctttatgaagtccattgagatccttgtcatggtggttctgggcggcatgggctccatgctgggctccattctgtccgctaccgtgctgaccatcctgcccgaggctacccgcagctttgagagctaccgcatggtggtctattcgctggtgctggtgctgatgatgatcttccgcccgggcggactgctgggcagctacgatttctccctgagccgcatcgtggaaaaggccatgaatggcgaactgttccgcaaacataccaaaaaggaggccgctgaccatgagtgagttcaagaccagactgcacagtgtgccctccggcggttttctgaccgaccgcgacaaggacaaaaagcccattctggacgtgcgtgagctgggtatcgacttcggcggtctgaccgctgtggacaactttaacctgatgatcggccgcaacgagatcgccggtctgatcggccccaacggcgcaggcaagaccaccgtgttcaacctgctcaccaacgtctaccagcccacccgcggctccatcctgatcgacgggatgcccaccgccggaaaaaagacctatcaggtcaaccgcatgggcgtggcgcgtaccttccagaacatccgcttgttcaaggagctgagcgtcatcgacaacatcaaggtgggtctgcacgagtccatgaagtataatctggcgtcctccctgctgcggatgccgaactactggaaagaggaaaagcagtgcaccgagcgtgcgctggaactgctggacatcttccacatggcagaccttgccaacgcgcaggccggcagcctgccctacggcgcacagcgccgtttggagatcatgcgtgcactggctaccggcccgaagcttctgctgctggacgagcctgccgccggtatgaacccctccgagactgcggagctgaccgagaccatccgccgcatccgcgacgagttcaacattgccgtgctgctcatcgagcacgacatgagccttgtcatgggcatctgcgagggtattgcggtgctgaacttcggccgcatcatcgccaagggcaccccggacgagatccgcgataacccgcaggtcatcgaggcctatctgggcaaaaaggagggctgagccatggctgatacattactgaaggtggacggcatcaacgtctactacggcaacatccacgccgtaaaggatatctctttcaccgtcaacgcaggcgagatcgtcaccctgatcggtgccaacggcgcgggcaaatccaccaccctgaaaaccatttccggtctgctgaagccccgcaccggcgatgtgctgtacaagggcaagagcatcaagggcgtacgcgcccacaagatcgtggaaagcggtcttgcacaggtgccggagggacgccatgtgtttttgcacatgacagtggacgagaaccttgatatgggcgcttacacccagcccgcttccaccattgccgccaacaaggaaaaggtgttcaccctgttcccccgcctgaaggagcgtcgcaagcagctggcgggcaccatgtccggcggcgaacagcagatgctggccatggggcgtgcgctcatgagcaacgcttccatgctgatgctggacgagccctccatgggtctttcgccgctgctggtgcaggagatctttgacatcatccgcgacatccacaaggagggcatgaccatcctgctggtggagcagaacgcgcagatggcgctttcggtggccgaccgcgcctatgtgctggagaccggccgcgtggtcatggacggcaccggtgccgagctgctgaccaacgagcgcgtccgcaacgcctatctgggcgggtaaacggaaaaatagtttgatttgcagttccgaaacgcccttgggcgtttcggaactgctttttcctgctatcactttactttcgtaaaaaattgtgccataatgagtgcagtattccggctttgcaaaagccacgccccggctcgggaaagcggggcgcaaaccacacagaatgaggggtaaacgttatgagcaagatcatcatcccggcaaactacacacccgcgctgaacctgtacgacacccagcgcgccatcggcacggtgaagcggctgttcgccgataccctgtgcgctacgctcaacctgtaccgcgtgtctgcaccgctgtttctggaggcttccaccggcctgaacgatgacctgaacggcgtggagcgcaaggtgacctttgacatcaaggacagcggcaccgaggcacaggtggtgcagtcgctggcaaagtggaagcggcaggcgctgaaggactacggtttccgcgtgggcaagggcctgtactgcgatatgaacgccatccgccgggacgaggagctggataacctccactcggtctatgtggatcagtgggactgggaaaagatcatcacggtggaggaccgcaacgagacctacctgaaaaacgtggtgcgctgcatcgtgtctgcggtgtgcgccaccgagatgaacctgcacgccatgttcccccagctgcaggatctgcccctgcacacccccaacgtaacctttgtcacctcacaggagctggaggataagtaccccgatctgaccccgaaggagcgggagaacgcctttgtcaaggagaacggcaccaccttcctgatgaagatcggtgcacccctgcgcagcggcaagcctcacgatggccgcgccccggactatgacgactgggatctgaacggcgatctgctgttctggaacgacccgctgcagtgcagctacgagctgagcagcatgggcatccgtgtcagcccggaaagcatggacaagcagctgaccatggcgggctgcgacgaccgccgcaccctgcctttccacaaggcggtgctggctggtgagctgccctataccatcggcggcggcatcggccagagccgcctgtgcatgctgctgctgggcagcgtccacatcggtgaggtgcaggccagcgtgtgggacaaggccacccgcgaggcctgcgctaaggccggcatcccgctgctgtaagcagaacgattttaaatatcctccgcttgcgctctggatattttcagcggaaaaaatattttttatttgaaatacagccaaacctgcgggcttggctgtatttcgctttttcttttataaaaaccaagaagggacagcctgtgggctgtcccttcttctgctttatatcttattagttctgctttttccagcggcgcatgacacccatgcccagtgcataggggccggtgtgcaccgcgatggtgcagccgatctgcaaaagccctacctcgcactgtgcgccggggtacttggcgcgcagggcggcgcgggtctgcatccacagacgcttgccctcgtcggcatcgtagccgtagcccactgtgatgcggtaatcgtccggggtaccgccgtgggcatccagatagttcatcagctgctccagcgccttttcaaagctcttctgacggccgcgggccacgccgccggagaagatctcgccgtccttgaacaggatcatgggcttcagtcccagcatattggcggcgcggccggtcaccttgccgatgcgcccgcccttgatgaggtagtccagatcacccacggtgaagaagatctggttggtggatttttccgcttccagccaagtcaccgtctcgtctagggtgcagcctgcgtcccgcatggccacggcgttttccaccatggtagattcggtcacggtggcggcggcagagtcgatgacctcgatgcgggcatcggggtaatcctccagcaccagatcccgggcgttgcgggcgctgcccacgcagccgctcatcttgccggtgaacaccagacacaataccgcccgacccgcctcggcgtgtgcgcggaaggccttttcaaagtcctcgatagaggccagactggtcttgggataggccgccgggttatctaccatgaactgatagaagtcccgcacggggatctccagcccttccttgcggtaatgctcgccgtccagcgatacataaaagggcacgacctcgatgccaagctgcttggcggtgtccagcgtcaggtcgcaggcgctgtcggtaatgatatcaaacatctgtgacgcttccttttctgaaactcaggggctgcttttggcggcagctcagccgcggtggatgtaggcttcgcgctctgcgcccaccgagatataggtgatcttgcagccaacagccttttccagatactccacataatcgcgggcctgctggggcagatcctcccacttgcgggctgcggtgatatcgcagtgccagccgggcagatactccaccacaggctgtgcggtatccagtgcctcacccatggggaagcgggtggtagtggtgccgtcggtcagcttgtaggcggtgaccatggggatcttttccatgtagtccagcacgtccagcagggtcagagcgacctcgtcgcagccctggcagaacacgccgtagcggcttgccaccagatcgatggggcccacgcggcggggacgtccggtagctgcgccgtactcgtggccggcctcacgcagagcgtgcttctcttcctcggtcatagccagttcggcggcgaaggggccgtcgcccacgcaggaggagtaggccttcatgacgccgatggagttgttcagcttgtggccggggataccggcaccgatgggtgcataagcaccgatgacgttggaggaggtggtgtaggggtagataccaaagtcgatatcgcgcagggcacccagctgtgcctcaaacagtaccttcttgccggctgcatcggcatcggccagatactgccccacatcgcagatatagtccttgaagatggcggcatacttttccagccatgcccacatctcgtccacgctgatgggcgctgcgttgtagctgccctccatgaccagattcttggaatccaccatggtgaccagacgcttcttcacggcgtcgtccagatgcagcagatcgcccatgcgcagggtctttttcatgtacttgtcgccgtaagcgtaggcaatgccgcgcttggtggagccgaactgtgcgccggtcttggacaggcgtgcttcctccagaccatcctgctccacatggtagggcatggtgatggttgcgcggtcggagatcttcaggtttgccggggtgatctcaatgccctgctcgcgcagcttattgatctcgccgtccagatgatgcgggtcgatgaccatgccgttgcccataacgcacacgacgttggagcgcaggatgccggagggcagcaggttcagcacgaacttgccgcgctcgtttttaacggtatggcctgcgttgttgccgccctgataccgtgcaacgatgtcatactcctggctgatcaggtcgaccatgcggcccttgccctcatcgccccagttgatacccgtaattgcagtaagcataataaatgacctctttatccttctttcaaaagacagccttttccgtgcaccttgcccgggatacgctaccttgggtaaaacgcaccggtttgctgcccttgcggcacgcaccaatgctattatagtatagcacagtctgccgcgcaaaaaaagggggaatgcacctttttgcggcgtattccccctataaaatcccgttctcagctgcgctccccggtcaggtcggtgcggcgagtcaccttgtggatggtgccgtccggctcctgaatggacgtgcgctccagctggctgcgcaggctggccttgatgtcggccagatactcctgccgcagcgtctgctgctcggctttttcgacctcggtcaggccgacggtcttgctctttttggccagcgcattgatgcgggcgatcttttcttccgtcatgggagaacctcctgtatttcatcgtaaaatatgctataatgtaggcaagaccattatagcaaaggatgataccaatggcaacacaacgcaactatgcccagcagatggacgccgtgctggcgggccttggcggtacccgcccgcgccttttgctccacgcctgctgcggcccctgctccagtgccgtgctggagcagctgtgccggtattttgagatcacgatgctgtactataaccccaacacatggccggcagccgagtattaccgccggggcgaggagctgcagaagttcgtggcagcagcccacccgctgggggtgaccgtggtggaggacacttacgacccgcagcagttctacaccgccgtagccgggctggaaaacgagccggagcgcggcagccgctgcaccgtctgctaccggctgcggatgcgccgcgcggcgcagtacgcgcgggacaacggctttgactggttcaccaccaccctgtccatcagcccccacaaggacgccgcacgcatcaacgccatcgggcaggaattggaggcagagttcggggtaaagcatctgccctcggacttcaaaaagcacaacggctacctgcgcagcctgcagctttcggagcagtacggcctgtaccggcaggactactgcggctgcgagttcagcgccaaagcaagaggcattgaaggataacgcaaaatgatttaaaatgcgctgcgcgttcgctttgcgcatcatcagcggaatcattatttataatttcggggttcaggaaagtctgcggactttcctgaaccccattttcacagaaagggttatagggaggcggcacatcattcctccggcagttttgccaccagaatggtaaagaccaccagccccacgcagggcacgatgttggaggccataccggcggcaagccccgcacgctcggccacgatgccgatgacccacggcatcaggatggcgccgctggaggccaccggcagcatgatgcccatgctggtcacgctggtcatgcggcccgcgctggccacggcggtggggttcagcccggacatggagatggcaaaggcgaacagcagcgcaatggctgcgccctgcgtgtgcgccatgaccagcaatatgtaaaacacggtgcacagcacgctcatgcccaccatggccttgcggggattttttaaggggaacacaaaggcaatgagcagccgtcccaccagcgtagcgccccacatcacggtaacggtgtaggccgccagcgtgcccgcaatgataccgctgcccttgaagtaggtcaccatccagccgttgacgctctgctcagcggcgttctggaagaacagcagcccggtcagcagccagaagcgggcagagcgcagaaagctccagtcgatggcttctttctctgcgctgcttttactcttgccgccgcgcagcggggtaaagacgtacaccagccagagcacaaggcccacgactgccagcagaaagacggccagctcggtgcttacccgggctgccgccgcaatgaggaaggggcacagcagtgcgccgcaggcgtagcagctgtgcatcaggttcatgccccgggtgcggtcggcggagtgatcgctgaccagaatggtacaggtattgatgacgctgcccttggcgatgcccaccacaaaaaaggctactgccagcagcgccactgcgccggtcagccccatgacggcgtagcccaccgcatagccgatggtcagcagcagcacactgcgtttcatgcccagcgcactgggcagcatgcccatcagcagccctgccagcaggttgcccacgctcatcagggagagcagcgtaccggtcatgccgtaggcaaagccgtagcgctcctgcagcagactgaccaccacacctgcgctgatggcacagatgccgctgaagaaaaaggtcgcaaagcccgcattgcgcaggcgcgtgttctgttgttccatggtgttcctctccttgcggaaatatcctttctctatttaaccattttttcgcatctttgcaaccggattttcttacaaaaagcagcaaaaaaactgccgcacaaaacgtgcagcagttttttcttttatgataagtatttctcagtccagatcttcggcttccagcaccgcaacgccttcgctttcaaaggtcttgcggaggatatcagccagacccgggttgggtgccttgttgtggatgcacaggatgatctttccgttcaggctggcagcctccacacccacggatgcaccgtccggcggtacccagacgccaaaatccgtggtgtactgtgccagctccggggtggcaggcatgagcggattgcccagatagctgagccagaagtccgaaatggtgccgccgatgtactcgcccatctggaacacccgctgcttgatgcgcaggggggctttttgctggttcaccttgtacacccagcccatctggtcggccatacggtgacgcttggactccggctgcaggtcccgcctgatgtctgcatctacatcagccacaaaatctgccaggcgagtctgggcttgcagctgcaccgtatgcccgaaactgcacacgcagttgtacagcgcattcggcacaccggccacatcgcgggtatcagacgagtaggaatactggatcttctccttgcccagatactcccgcatggccatacacagcagacccatcagagcgcttaccggctttgcgttgttcgccagcgctttttccacaaggctctgcttgctcaggcacacccgggtgcggcgcagcgcaccctcgtaggtctgcaccacatcccgctggatggcatcgctcccgccctccacaggcgggtactctgccagcatggcctccatatcatagggcgggtcgcacacgatctgcggcaccgcaaaggccgtgccgtagcgcaggttgcagtactgctccagaatgctggtgagtaggggcgataccccgtggccgtccagcaggaagtgatgccagtcaaagtagacggtatccccttcgcagctgacgcagaacaggtagccgttcgtctgttccgggatattgcgcatggtgctgccggggtacacaaggcagggctccgtattgggctccagccacatctcccgcttttcctgcaccagacgctgggtataatagggtgcacttgccaaggccgctgtcagtgcccgctgcaaaagggtgatatccaccgcatcccgcagcgagaactggtaccggcactggatcttttcccgacggaaaaagtacatgattccctgaaagttatattccgtcgagcgctgctgtgtttccattggtttttaccccacgtttgctgccagataatccaccagatcacccatggtgacaaagttgcgcagctccttttccgggatgcgcaggccaaaggtctcctcaagatctgccacaatggtcaggatctccatagaggacagatccagatcgtccatcaggacgctgctttcggtcacatcctccggcgatacctctgcgacatcctccagaatagccgtgatctgagaaatgatttctgcacgttccatcgtattatgcttcctttctgttgcgttttacttgcgcaccagcttgcccgtagcgttgcggggcagcggcgtttcgctgaactccaccacgccaatgcgcttgtacagcgggacggtgcggttcatctgggcaataaagtcccgcaccgtctgctggtgctccttttcacagtataccacaacacctatctttttgcccagttcttttacgatacattcctgcacggcgggacatttttccagcatgccttccagctcttcggggctgaggttctcgccgctgtccagaatgatcagattcttcttgcggccggtgatgtagtagtagccgtcctcgtccacccgggcaaggtcgccggtgtggaaccagccgtccttgtcgatgaccgcagcggtggcctcggggtccttgtagtagcccagcatgatgctgtcgccccggatgcacagctctccgtccggctcgagcttgtagtccagataatcgttgccctgtcccacagcgccgatgtgctttgcatcctgcgcgtagttgataatgccatcgccgcaggtctcggtagcgccgtaggtctgcaccacaaacatcccgttggtggccatatccagcatcacctgcgggtcaaacatggcagaggagcagatgggcacccacagctctcccaagcgctccttgcggccgcgcatcacgtccttgtgcagggagttcatgatcaccggcaccaccgccatgacctgactgggcatccgccggatctccttatagaagttgcggatatcgccgctgatgttcagcgcccagcccccgtgtgcccaagagaacaggcagatgaatgcgcccagatggaacataggcagcaccgtgtactggctgaccacaagctccgggtcgtgcttatactccatcatgcgctcaccgatctgcacatgggcgcgcatcacgctgaagaagttgcgctcgctcagcatcacgcccttgctgcgtccggtggtgccggaggtgaacatcaggatcatcaggtcatcgtggccgatgcagcggggcatctgtgccaccggctcataagcgcggaagccgtccatggggcgcaggatgctgccgtaggcggcctgcagctgctcttttgtgccgtagtcgtcgccgtcggtcaggatggcagcggggtccaccagccccagctcgtaggacagctcgtcccagctcttgtgctggttgagcagtaccagtacaccgcccgccagaatgatgccgaaggtgttcacggcatactcgtagcagtttttattcagcaggcagatctttttgcccttgatatccgggatggtgctctggaagtagctgaccgcacggcggatatcccgcgcgtagtccttataatggactgcggtcacctcgtccgtttccttatcataaaagcggagcgccacacgctccgaaaaacgctgttccatattcagggtgaccagatcatacacgttgtccaataccttgatcattgtattttcctcctgcgttgttatttcatcctgcggcagtgcgctgtactgtgctcagtatacaatattttccaatgcaatgcaatacttctgcaacatttaatttctcactttgacaactttcaattgcgcatcttgggatacgccccggccaaattctacctttcgttgcaatccgccggttttcgtgctacaatttttagcgcaaaataccagttccggtatggtgcagactgcaaaacaaaattgacagtctctataaaaagcattatactagccatatatcatggcaatgctgtataaaaactgatcatttgcgccgtatccggctttttctcgaggggtattggcccggcgcagggaaggaatctttcatggaaacaaccaagccccgcactgtcaactccatcgggatgtttgatatgctcaagggcgctgggatgctggccatcgtgctgggacacactgcggagctttacccactccagctggagggcggcctgtcgctgacggcctttgtcggctttatctaccgcgaaacgctgatggcggccttttttattgccagcggctacggcttccgcaagcgctccatcagcaagtgcatccaccagcagctcaaaagcctgctcaagcccttttgctacactgcggtgttcaccacggtgctgcacttcatcattcattataaaacctttcactatctgcccggctccatgactgaaagcatcaaggtggcaggcggctttctgctgggtctgccccatactgccacctacttcgggcaggagttcttttcctgcgggcccatgtggtatctgctggcgctgttgatgggctggatcttactggacgttatcctgaacatcttcccagagcggtacatcccttgggcggtgggcggtgccgccctgctgggctggggtgccagccttgtatgggagctgcccttctgcctgatccagggcgcggtgatcacgccgtacctgtaccttggctaccttgccaaacggcagcattggctggatcagcctttgtcccgccggatgtcctgcatcctgtgggcagccgtactgctgatcccggcagccgcccttgccacccgccgcaccgactgtgtatccatggccgagtggtcgctgggccccatcagcatcctgctggacggccttgccggtctgctgtttatccggctgtttttgcgctggagccagcgccgcaacccgctggtgcgctttttcgaggccatcggccgccgttctctgtacatcttctgcgtacatacggtggagctgatcgccattccgtggtatctgttcgccgccaaatacgccgaccgccctgttttgggcatcagcctgcaatacatcctttcgctgggctccatctggctgatctgtgccctgctgcagcggcggcgggatctgatcatcaagttgttccccgcccggcggcgcacccctcaggtacattacgccccgcggcactgatttttctgaatgttttggctgcggcggtgcagctgttataggataaaggaagaggaggatcccgttatgaaccacgatgcccccatgacccctgctgccatgcaggcgcacattgccgagctggagcagcagctcaagctttcggacgagggtgtttcccagctggcgcagcggtgtctggagctggagcagcagctgctggcttgccagaccgagcttgccaagcacagcgccgaggctgagaatatcacccttaccctgccgcagctgttctacgacaccggcagtggcttttcgccccgggaatgcctgactgccaccgaggatgtctacaacgaactgacccacgaggtctcggtcacctttgtcctgccggaggacgcacgcgccatccgtctggaccccggcgagttggcctgctgcatcaccgaccttgccatctcggacgagcgcatcagcttccagtcggtcaacggccttctgctgcaggaggacagcctgctgtttttggacgtagaccccaacctttcgctgcactgcaccaccggctttggtgccggcatgaagtttgcggtgaactatcactactacccgctgggacgttttctgcacgagcagcccggcaagtctctgctgcgggcgctgaacgacctgaagcttgagaacgccgctgccgcgcaggaggcagaggaagtattgcaggccagccgcgccgagtgtatgcggctgaaccagcagctgctgaccttgcagggcatccagcacgaatatcaggtttcgctggaaacgatgcgcgccagcagcagctggcggctgaccgccccgctgcgcagactgctgaacctagtgcgcggtcactgagcccgcccgatattctgcccggaggagttggatcatgtacaccagttacagtaccctgcagcgcaagcaattgtgcaagcaggtctataccgatacccagagcacctatcttctggtctacgcgccggggcgtcacaaggcgctgcaagcggcgctgcaaaaccagctgcaccgcaagttccgtctggtgacccagcttgaggacgagctgacccccgatgtagccggggtgctgctggtaagcgaggatgtggagtgcacccccaccgccctgacctattttgccgccgccctgcgggagggcgcagaccttgcggtctgcgacgcctcctttggctttgacggctccaccgccctgtacctgagcacccggcacctgcccggcagcagctgcgcactggtgtcccgcgcattgctggacaaggtacgcgccgccgcccggggcaaggacagcgttaccgaactgctgcgtctggcccacgccatggcgcagcacagccgctgcatcccgcaggcgctgctgcacttccgccgggagctgtgcgccgacgatgtattctccgccaagggacgccgtgcgctgattttgagccatgagctgaccatgaccggtgcgcccatcgtgctggtaagtgccgtgccggtgctgcgcagcttaggctttgaggtggtggtgctggggccctcggatgaaggctcgctgccgctgtttctggacgccggggccgctgtggtcacccgctcggactgcgttacttccagcgccctgtgggggctggccaccagcgcagactttgtgctggccaacacggtggtggaagcaccggtggtaaacaccctgaacggctcctttgtgccggtgctgtggtggctgcacgatgcctttgcaggctatcccttcatctcccacagcatccccaaggcgctgggcaaaaacgtgcacctctgcgccgtaggctcccacgccaccgccgccatgcactccgtccggccggattttgaaatcgagcagctgatctacggtctgccggactatgcagccgagcaattcccccgctatgacatcagctttgccggggggcgccccctctttgtgacggtaggctcgctggagcaccgcaagggtccggacatcttctgcaacgccatccggctgctgccctctgcagtgcgggaaaaagctgccttcctttttgtgggcaaagccgccgacaaggggatgtacaacgccgtggacagcttggtgcgggactatccccagaccgttttctaccgcaagcggctggagcgcccggaggtcaaatccctgatggagcagtgcaactgcgtggtgtgcgcctcccgggatgaccccatgcccaccttcgtcaccgagggtctgatcttcggcaagccctccatcgtatcggagcacaccggcaccgccgggctggtgaccgagggcgtggacggcttcctctacaaggacgacgacccgcagcagctggccgacaagctggcctgggccatcgagcacccagaggcgctggctgccatgcacggcagctgccgccgcctgtacgagcagcagttctccaacgaatcctatgtcgccaccctgacaaggctggtaaaagagctgacggacggggaagaatcatgaaaaagcaatgccggacagctgcacgctgcccggcattgctttttcacgggagaggtctccccattttatcaaatcccccaaattgcccaacaaagttccgcctccgttcacaaagggcggcgggagatgtgctatactggttccagaatttccggttatgaaaggagttttgtttccatgagccaagccgccgcgcagcagccctcccgcaaaaaggccgtgatctctctgctggtgctgctggcacttacctgcatcatcgtgttcacttttaaggatcactgggccgagatcactgcggcgctggcgcagctttcggtgtggcaggtgctggcggtgctggcggtcggcctcagctaccccctgctggaggggtgcgtggcgtgggtcatcgtgcgcagccgtctgccgcagttcaccctgcggcaggggctggatgttggctggtgcggcacctttggcaacgtggttacgctgggtgccggtgcggtgccggtgcagctgtactacctgcacaaggccgggctgccgctgggccccggcgcggggctgatgacgctggaatacgttttccacaagagcacggtgctcttgtacgccaccgtgatgctgctgttgcagcaccgctggcttgccgccaacaccaccggtgtcatgcggtatctgcccatggcatacgctgtggtagcggtgattatcgtggcgctggtgctgctgtgcgtctcgccgttggtgcagaacctcgcccgctggctgctgggctttttgcccaagaccgaaaagtggcagcagcgccgcgccgactggctggagcaactggaggtgctgggcaccgagagccgccgcctgctggcagataagccccgctgcctgaaaatttttgccctgcaggcgctcaagttgttcggactcttctgcctgccctacctgtgcatccggttcatggggctttccccgctgggcttctggcaggtgcagctgctcaccagcctgatgctcttcgtttccaacgctctgcccaacgtagccgggatgggctcgatcgaaacggcctttttgctggtgttcggcagctttctgaaacggggcgaggtgatgagcgtgctgatgctctaccgcatcgccagctattatgtggtatttgccgccagcgccgtgggctttttcatcgcccagcggcatctggcccaaatggaaccaccaaaggaggggtgagcagatgaaaagcttccacattccccgcaccgctttattttttatcctgtttgcactggcagcttttgcggtgctataccatcccatcgacctgaaagcgctggtgcgcgccagctcgcagggcacgctccgcaccgaggaagtggcgcattttggcagcacaaacgacatggactatcacctcctctccatggacagcgaagcgttccaacaaacggcagaattgctttccaccgtctcctgccgcaaaaagctgaaccagcgctattctgcctacacccacgatacctttccggtgcagtcggtcaccgtcagcttttatgacgatgccgagaaccagaagtttctgctgacggtgtattctgacggcgtgtgcatcctgaacagcgcctttgtcagcgtaaaataccccggcggcggcgcagcacagctgtatgaacaactggcggagctggggcagtaaaaacaaaaatcggggcactcaggtggtcaagctgagtgtcccgtttttgttttctttgcgtcggctgtggtaccaaacacagccggtgccgcgccggaagcagcagagcaaaccgtgctgccgcttcccgtagaaaagagaaaggaatggaggaatggagcggagcgcttgcagacgctccttttttctggtgcaacgcggttagaattagctaaccgccgctgcgagaacaggataccacagtcagttagtcttgtcaacccttaatttacaaattttttcgcaaagttgctgcgccgccggggtttcggcgttttttctacattctgcccaaagaatagcctttccgctggaagaaaacccacttgttttctattgctttttaaaacggttcttgctattataataacgcaagattttgtgggcaggtttttatttttgtctacaccttgtagtaagggctgccgcagacggcagcacaagaccgtttcgcccccagaaaaccgcccagacagagcggtttttcaaaggctcattagttagaaagcgctaactgcgtaatggagcaaggaggttccaatgatccagtttgaacagtgggaaggctttgaaggccgcatctggaaggaagaggtcaatgtgcgtgacttcatccagaaaaactacaccccctataacggcgacgaaagctttctggcaggccccaccgaggctaccgataagctttggggtgctttgcagcagctgcagaaggccgagcgcgccaagggcggcgtgctggatatggagaccgaggtggtcagcagcctgacctcctacggccccggctatattgacgaaaacctgaaggatctggagcagatcgttggcttacagaccgacaagcccctcaagcgcgcctttatgccctacggcggcatcaagatggcagagcaggcctgcaccacctacggctaccagccctctgccgagctgcacaagatctttaccgactacacccgcacccacaatcaggctgtgttcgatgcctacaccccggagatgaagaaggcacgccacacccacatcatcaccggtctgccggacacctacggccgcggccgcatcgtgggcgactaccgccgcgttgccctgtatggcatcgatgccctgatccagttcaagcaggaggatcttgccaactgcggcgacggcaccatgaccgacgatgtcatccgtctgcgcgaggagatcgcccgccagatcagcgccctgaagggcatgaagaagatggctgaggcctacggctacgacatctcccagcccgcaaaggacgccaaggaggcctgccagtggctgtacttcggctatctggccgccatcaagacccagaacggcgccgccatgagcgtgggccgtatctccaccttccttgacatttatatccagcgcgatctggacaagggcatcctgaccgaaagtcaggcacaggagctcatcgaccacatggtcatgaagttccgcatggtcaagtttgcccgcatccccagctacaaccagctgttctccggtgaccccgtgtgggcgacgctggaggtgggcggcatcggcatggacggccgcagcatggtcaccaagaactgctaccgcttcctgcacacgctggaaaacatgggccccgcaccggagcccaacctgaccgtgctgtactcctctgccctgcccgaggcctttaagaagtacgccgccaaggtttccgtcaacaccagcagcgtccagtacgagaatgatgacgtgatgaagcccgtctggggcgacgattactccatctgctgctgcgtgtctgctacccagaccggcaaggagatgcagttcttcggcgcacgcgccaaccttgccaagtgcctgttgtacgccatcaacggcggcgtggacgagaagagccacgagcagtgcggccccaactacgcccccatcaccagcgagtacctgacctatgacgaggtgctgcccaagtatgtgcagatgctggactggctggcagggctatacgtcaacgtgctgaacctcatccagtatatgcacgacaagtactactacgaggaggccgagatggcactcatcgacaccgatgtgcgccgcacctttgccaccggcattgcaggcttctcccacgtgatcgactccctgagcgccatcaagtacgccaaggtgaaggtggtgcgcgatgaaaacggccttgccactggctttgagaccgagggcgacttccccaagtacggcaacgatgacgaccgcgccgatgagatcggcgtgtggctgctcaagaccttccttgagatgatcaagaagcgccacacctaccgcaactccgaggctaccacctccatcctgaccatcacctccaacgtggtgtacggcaagtacaccggcgctctgccggatggccgcgccgccttcaccccgtttgcacccggcgctacccccagctacggcgcagagcagaacggcctgctggcctcgctgaactctgtggcaaagctgccctaccactgggcgctggacggcatctccaacacccagaccatcaaccccgaggcactgggtcacagcgagggcgagcgcgtggagaatctggtgcaggtgctggacggctacttcgatcagggcgcacaccacctgaacgtgaacgtctttggcaaggagaagctgctggacgccatggagcatcccgagaaggaagagtacgccaacttcaccatccgcgtttccggctacgccgtcaagttcatcgacctgacccgcgagcagcagctggacgtgctggcacgcacctgccatggcgtcctgtaagacccttgggtacgtccactcgctggaatccttcggctcggtggacggccccggcgtgcgctttgtggtgtttttgcaggggtgtgccctgcggtgcaaatactgccacaaccccgaaacatgggcagagggcggcgaggcgtggacggcggaagcgctgttccagcgggtataccgctaccgcaactactggggcaaaaagggcggcatcacggtcagcggcggcgagccgctgcggcagatggactttctgaccgagttcttcacgctggcacgcgccaagggcgtgcacacggcgctggacaccgccgggcagcctttccgcccggacgacccggcctatctggccgcatttgaccgtctgatggctaacaccagtctggtgatcttagacctcaaagagatcgacccggagcgccaccggcagctcaccggcaaagacaacgccaacatccttgccatggcgcggcacatctccgacctcggcatcccgctgtggatccggcacgtccttgtgcccgggctgaccgatgacgaggaggggctgcgcaaaacggctgactttatccgctcgctcaaaacggtgcagcgggtggaggtgctgccctaccacaccttggggctgttcaagtggcaaaagctaggcatcccctatcccctgccggacgctgtaccgcccacggcagagcaggtaaagcgggcagaagaactgctggaagtaagccggtatcccgggtaaagcaccaccgttttgattgcgctccgcttcgctctgcgcaatttcagcggaaagaatatctatgattttggcccccggagcgtctgcggacgctccgggggcccttttcacgggtaaaaatgggatatcggaacgcccgcaggcgttccgatatcccgaaattcagaataattcttccgctgaggatgcccaaagcaacgcggcgggcattctgaatcgttctttgttcctccttgacttccctgcaccgcaccgctataataaaggggtaaaaggataaatgcgtttatccgggcagagtagcgccgtacaccgtctgcgcagagagaacaggccactggctggaagcctgtttgcagaccgccgcgcaaagtgcgcccggacagcacgcggcgggaaccccgtggggaagtatcgccgtgcggtgcgccgccgttaccggctttgagcgacaaacagaagtggaaccgcgattttgattttaaaaccgccttcggagttgtgccttgtgcaccgctccgggggcgttttgttttgcggcttctgtttggaacaaaaaggagaattgaccatgcagatcttcaacaccctgacccgacagaaggaagaatttgtaccgcaggtgcccggcgagtaccgcatctacgtctgcggccctaccgtgtacaactatatccacatcggcaacgcccgcccgctgatcgtgttcgacactctgcgccgttatctggaataccggggcaacaaggtgatctacgtttccaacatcaccgatatcgacgataagctcatcaagaagggacaggaagagggcacctccatgaaggaggtggcacagcgctttgaggccgagtacctgaaggatgccgccgggctgaactgcgaaaagcccactgtgcagccccgcgctaccgagcatatcccccagattctcgatatcgtcaaagacctgatcgactccggccacgcctacgttgccaagaacggcgatgtgtacttccgggtgaagagcgaccccggctacggcaagctgagccacctgaatctggacgatctggaaagcggcaaccgcgagctgcgcagccgcatggaggacgatctgaaggaggatcccgccgactttgccgtctggaaggccgcaaagcccggtgaacccgcatgggaaagcccctacggcatgggccgcccgggctggcacattgagtgcagcgccatgagccgcacccatctgggcaagaccatcgacctgcactgcggcggtcaggacctgatcttcccccaccacgaaaacgagatcgcccagagcgagtgcgccaacggctgcgagtttgcccgctactggatgcacaacggtttcatcaacgtggacaatcagaagatgtccaagagcctgcacaacttctttaccgtgcgggatgtggcaaacctctacggctacgagcccatccgctactttatgctgaccgccggctaccggatgcccctgaactacaccgtagacctcatcgagagctgcaagaacagcctggagcgcctgtacacctgccgcgagaatctggactttgccctgagcaagactgacttcggcaccgacgagaccctgaaggaaaaggccgccgaggcacgcaccaagttctgcaccgccatggacgacgacctgaacaccccggatgcactggcctccgtgttcgatctggtcaaggagatcaacaccctgtctgctgcttccagcaaggctgcactggagacggctgccgccgcctttgacgagatcaccggtgtgctgggtctgctgtacaaccgcaagaaggacgaggtgcccgccgaggtgactgagctggtggaaaagcgtgctgctgccaagaaggccaaggactgggccaccgccgatgccatccgcgcacagctgaccgaactgggctgggctgtcaaggacaccgcacagggtccccagctgagcaagctgtaagctttgctcagctggcgggaggaccattttaaatggcctccgcgctgctctggccatagttcaaggaattataatttagaattgggggttcagaaacgcctgcgggcgtttctgaacccctttttcacagctggggtctcaatcccgtgaaaatgcaatgtcggagcgtccgcagacgctccggcattgctctattaaaaataatttttccgcaacggcaaaagccccgcagggcggtatgctctgcggggcttttgtccatagggaaggaggcgtaataaagaaaggacggatcagaaatccacctcagtgtcgtagtagcagcacttgagcagcttctccatctcctcctgactgggctggcgggggttggagccggtgcaggcgtcggcgatggcgttcttggcgatctcgggcagacgctccaggaacacttcctccggcacaaagccctgctcggtggggtaggagtccgggccgtagtgctggatgcagtggggaatgttcagcgcgtcgttcatgccgcgcaggtactcgataagcagcttgaccttctcgtcatcgtttgcgccgcccagcttcatctcgtccgcgatgacgccgtagcgcttcttggcctcggggtccttggcgttgaaggcgatgaccttaggcaggtacatggcgttggccgcgccgtggatgatgtgtgcgccgtagtctgcaaaggcagcgccggtcttgtgtgccatggagtgcacgatgcccagcagtgcgttggagaaggccataccggcaaggcactgtgcattgtgcatggagtcgcgcttggacatatcgccgttgtagctgtccaccagatcgccctggatcatgcggatggcgaagatggccagaggatcggtgtagtcgcagtgtgcggtggaaacataagcctccacagcgtgggtcatggcgtccataccggtgtgggcgaccagcttcttgggcatggtctcagccagatcggggtccacgatggccacgtccggggtgatttcgaagtccgcgatggggtacttgatgcccttctggtagtcggtgatgatggagaaagcggtcacctcggtggcagtgccggaggtggaggaaatggcgcagaagtgtgccttgcggcgcagcggcgggatgccgaacaccttgcacatctcctcaaaggtgatctcggggtactcgtacttgatccacatggccttggctgcatcgatgggagagccgccgcccatggcaatgatccagtcgggctcaaacttcagcatggcctcagcaccgcgcatgacggtctccacggaaggatcgggttcgatgccctcgaacagctccacttccatgccggcttccttcaggtactccacggcacgatccaggaagccgaaacgcttcatggaaccgccgccgacacagatcattgcctttttgccggtgaaggatttcagcgcttctaaagcgcccttgccatggtacagatcacggggcagagtaaaacgagccataatacaaaacctccaaaaatagtacggcacacgcagcgctgtaccgcagttcattattatgttaattatataacaatttggaggcagcttcaattgacgtaccgggagaaaaagtcgttctattttgggcggtttccacaagcagtaggatgcaacagtcctcctgccctgaaaaaagcgcaaaaaaacaccccgaagtcctaagacttcgaggtgcttgcctttggagctgctatccagattcgaactggagacctcatccttaccaaggatgcgctctaccaactgagctatagcagcaaatggcgacccggatcgggctcgaaccgacgacccccagcgtgacaggctggtgctctaaccaactgagctaccgggccatgatcgctcaagttcgtgcggcatcttaccgcgggaacgtgctctattatatcggaaagtcggtctgttgtcaagcacaaatttgcggaaaatgcaattttttgcaaaagcgggccaaaaaacaaaacgcacaagttccgaagaacctgtgcgtcatggcaggggtagtaagtttcgaactcacggcacgcggttttggagaccgctgctctaccagctgagctatacccctatatacattcgctgaatgcttgattattatagccgatgcaacggggaatgtcaagccttatttttacttattctcatttttcgcgccgccgcagctgcagcagctctcctgcgcggcggaatccggcgcaggcagttggcttgccaactgttccagcgtaacgctgtcgatatactggttgatcacctcgtccagccccgcccagaacggcagggtgaagcactgctcggacatggggcattcgttggtcacgctgccaaggcacggaatgggcgctacgctgccctcgatggcgcgcaggatctcgccggcggtgtagtcggcgggatcttttgtcaggcggtagccgccctgactgccccgctcgctcttgaccagccccacccgcgccagcggggtgacgatctgttccagatatttcaggctcaggttctgccgctcactgatctccttcaggctgacggttgtgcccggcgcatagcgcgccagctccgccatcaggcgcagggcgtagcggctcttggtggaaaatttcatggtagtcctctccttgttgcagtttatagtatagcacgttactcggattttgcaaaggagaaacctcttgtgcaaacaaaaaaggtctgttatcataggatggaacagaacctatctttgaggagtgagagtatgacagaaaagatcaccgccgcagacgccatccgtctgctggataccggcaaggctgtcgccgtggatgtgcgcgagccggacgaatacgctgtggggcacatccccggggcaaagctgctgccgctggggcaggtcatcgaccgcgccgccgaggtgctgccggacaaaaacgccctgtggctggtgtactgccgcaccgggcgccgcagcgccgacgctgtgcagaagctggaagcccttggctacacccacctgcgggaccttggcggcattttaagctggccctacgagatcgagggcgattttgaggggcatttttaaggttatatactttataagaagcacaaacccacaacagaaaggaaaccatgccatgtcgttccatgcaaaagagttcgcgggcagtcactgcggctgccgttaccagcaggattaccgccctaccttagggcgggacggcaaaaaggaatccggcacgctggaggtcatcaagttctactacgatggcgctatccgctttgagcagcactgctatggcgaggctgccacctttgtgttcggcgtgtgggcgtccggcatggatgaggacggcacgctgcactgggtactgccggaccgccgcaagagctattacgacgaaagctatctgcccaaaaagctggaccgggtggacgaagccggaaacctgtactttgacggcggcatcttcccgtggaagctggcggacgactttgccgaggataagcgctggggctaccccaagtggaaggtggcgctgggtaagctgaccggaaagggcaaaaaaggtgactgaatcacgaaaatccagtattcatattgacatactagggaatgatatggtataacttatccgttgaaaggattccgcatctgcacagggcatttaaggctcccgcagacgcgttcaataagaaaggatcattcctatggaaaacatggaaaaagtggtttatctggataatgctgccaccactccctgtgctcccgaggcactggaaatgatggtcaaagccctgagcggtgcctgcggcaaccccagcagccattacagcatcggctatgaggcaaaggaattcgtggacaccggccgtgcgcaggtggcaaaggccatcaatgcaagtccggctgagctcttctttaccagctgcggctccgaggccgacaactgggcggtaaagggcaccgcctttaccaaggcacgccagaacaaaaagcacctcatcaccagcgcttttgagcatcatgccatcatgcacagcatggctgcactggagcgcatgggctttgaggtgacctatatccgtcccacctccgagggctacatccgccccgaggacgtggaggctgccatccgtcccgacaccgcactggtcagcatcatgatggccaacaacgagatcggcaccatccagcccatcaaggagatcgccgagattgcccacaagcatggcgtgtggatgcacaccgatgcggtgcaggctgtgggtgccatccccgtggatgtgaaggagctgggcgtggatatgctgtccatgagcgcccacaagttcaatggccccaagggcatgggtgcactgtactgccgtaagggcgtatggccccagaacttgatcgatggcggcagtcaggaggcccgccaccgtgcaggcaccgagaacgtggccggcattgctgccatgggcaaggcactggagatcgccacggcgcatctggatgagcgcatggcccacgagagcgagctgcgggattacgtcatcgaccgcatcctcaaaaacatcccggaagcccgcctgaacggcggccgcagtccccgtctgcccaacaatgtgaacatcagcttcccgggtctggagggcgagaccattctgctggatctggatatgcacggcatctgcgcctctaccggctctgcctgcaactccgacagcttggaccccagccatgtgctgctgagcatcggcctgccggaggagatcgggcacggttccatgcggttcacctttggcccgcagaacaccatggaagaagcaaaatatctgtgtgacgtgctggaggaggtcattccccgccgccgcgctatgagttgtatgtggctgcagggtcagaacaaggcccgccagttcagcctgaagggagaacagtaattatggcaagtatgtatagtgccaaggtcatggagcatttcgcaaatccgcacaacgtaggtgagctgcccgatgcaaacggcgtgggtgaagtgggcaatcccaagtgcggcgacatcatgcgcatgtacctgaagattgagaacaatgtgatcgtggacgtcaagttcctcacctttggctgcggcgcagccattgccaccagcagcatggccaccgacctgatcaagggcaagaccgtggacgaggcactgaagctgaccaacaaggccgttgtggaggctctggaaggtctgcccccggtcaaggtgcactgctctgttctggccgagcaggctgtcaaggctgctctgtccgactactaccgccgtcagggcatcgacccggaacccatcgtgggcaagctggaagaggactgtgagcactgcgagagctgcggccactgatcctgacagtatcctaagcaaaaaaagaggacaccgcttcgtgcggtgtcctttttttgcgtccccacttgtgagaaaagggacaccggagcgtccgcagacgctccggtgtcccaaagttatagatccgttttccgcgccttacaccccgccgtgacggcgctgctcggcggcaagctcttgctgcaaagcggccttgcggtgatccagcagcagatccttgttgtacttgaaataccgttcgcagccgttctcggtgaggaactggtgagaggcggggttcaccgtaagttcggtgacgaacaccaccatctcctgactttccgcaaaggcctgctccataaagtcgaaggcggcttccagcgcagcagcggcggtcttttgagcggcttcgcgctggtccgccagcgcgccaaactggccgcgcagcaggtcgaaggcctcctgcgtaccggcggcgttggcgcggcgcagctccccttcccactggtgcagcgcggcctgcacctgcagacggttggtcagctctgccttgcccagcagcccggcatcgcgcttttgctgggtctcggcttcgtagtccttgatctgctggctgaacagttccgcagagccgtccgggatatcctccggcagggtagccagcgcctttttggtctcccgcaaaaaggcgtagcaggcatcggccacggcatccgcctgcaaagaggcggtaaaacgggtgtccagcccggccagcagcaggctgacaaggctgagccgctcatcaaagggagcctgcagcagccgggcgaacacggcgggctttgcctgcccggcaagaatttcctccacgccgtagtcgtcccggtacttgtagtacagatccagataagccgaaaagtcctcggcgatcttcgggtgctggatatactcccggatcagttcctcatctgcctgcaagcccagtgcttcgtaggtgtccagcaggttggaaagatcctcccagccgcgggcggtgacgaactgggtgccgtccacgtccgcgttgatctggtaaaagttctggggatgcagttccagataactcaggatggcgctgtggatatgcgcggcgcgggcgtagtccttccacaccggcaggtcgggctcgatatccatgcggcgcacgcggtcaagggttacgatgtcaaaatcccggacggatttgttgtactccggcgggttgcctgccgccacgatgacccagcccgcaggcacagcctgattgccaaaggtcttgcactgcaaaaattgcagcatggtgggggcaagcgtctcggacacgcagttgatctcgtcgatgaacagaatgccctcagaaaggccggtggcctccattttggcgtagatgctggcgatgatctcgctcatggtgtattcggtcaccgacacgtccttatcgccgtagtggcgctgccggataaagggcagacccacggcgctctggcgggtgtggtgggtgatggtgtaggccaccagtgccaccccgcactcccgggccacctgctccatcacctgcgttttgccaatgcccggagggcccatcagcaggatggggcgctgccggatggcgggaatggcgtattcgcccagcgcatccttagcaaggtaagcttttacggtatgctcgatctcttctttggcacgtttgatattcataatattttcccctcttgtcaggagttgttcaactcgcggtacaggtcatcctcttcggccagagcgtccgcaagggcgctggccgggcgggctgccgcaccggtaaattcttcttcgtccagtaccaccttcatcgcccacggcggcacattggcatcatcgaaccgctcccctaaaaacaggaaggcggtatcgtagccgggacgccgcgccgggtaggtgcccatgccgtcggtgaagtacagcaggccgcgcaggttcgaaaacttcttttcggcgcaaagctgatccacatatgcaaaagccgggcggaaatccgttccgccgccgccccgcagctcaaagtggttcatggcgtggatgagttcatcctcgttgcggatgaggatatcctgccgcacggcgttgtcggcctgaatcaggtgcagattcatgcggtggaaaaagttttcccgccctttcagcagggtgtaggtctcagccagaaaggcgcgcaccagctcgccggaggtggagtagctggtatcaatgaccaatgccagctcctcgatttttttgctttcccggctttccagcggctcgatcaggggcaggttgccgtacaccgaaaggccgtaggtgtagaagttcagatcgaactcgtccgggtccagttttacctcctcgcgcaggacgcagaaccggcgcagaaagtccttgtagctgcggcggctgcggttggcggccttcacctgctgctttaaggcatcggcaccctcgcccgcctctttatcccgcaggtccagctcggtctgcatccgctccccgatcttctgccacgttttctgcggcagaggggtgggcatctgctggggctgctccggggcatccttcggccacaggcggtggtcgtcggtgacaaattcccgctccagctgccgcagcacgccgggcgtctgccgggtgagccagcggtacaccggcgctgccgccaccaccttttcctcagcggtgatctgccggtaggcattctgccgcacataggtcagcgggcgcatcacgcttttgcgctgtaagttgtcaatgacgttttccaccgcgatatcacacgcaaggctccacagctgcggctcgcggcggcctttcagccacaaatgccggaatacgcagtggaatattgtgtgcagatacaaccggttgagatatttcgggttctcctgataaagctgcagcaggcgctgtggctgataatacagggtctgtccgtccgtagccagcacccggcagcgctcgtccggggcggggttcagggcgctgagtgccatatccagaaaccggaagtccagatacagcccgctgcgcaccaccgccagcacctcgccacccatgcgtgcctgccactcctcgtgggtctccggccgctgggattggaagggcttgcgggggtcgaaaaatttttcttttggcaacgtgtggtcacctctcaaaaatcaaaatcgtaccgctgctttttggactggggagcatattttttgtgctccgcatctgccaacagggcggcagcggcggcgttttctgccttggcggcaagggcggcggcagatgcaaaagcggctttatccagcacgtccaacgccagcagggcgcggatgctgtcggtgtcctgtgcctttaaaaggcgggcgaacacccggtcggtgttggctgccagaaacgcccggtagtgcccggcggcagcttcggtcagctgccacggataccgcaggcggccaaagcagagcatggccataatggcggcgtcatcggcatcgtgcccctgcgggaagatggcgtcatattctgcggggaggaatttattgtcgagaaaacactgtctgtaatggtatccctgcccggaaaaggtgtgcagcaggatgtgggcgggggtctcctcgatatcctcccagtaggcggggtaccacagcgccgccagcggcgcgggggcatcggcgggccagaactgcgcctgcacggcctcggtgatgttgttcaccagtgcaaacagcccagtgggctgctccggtgcggcctgcacccgcagcgtctccagcgcaaagcagttcagaaacacatcgctgcccacggtaagtcccccgctgcccaccgtgagcaggcgcaggctgcggcagttgtaaaaggcgcagctgccgatgacctgtacgctgtccggcagggtggcttcttccagaaagctgccgcacaccgggtgcagttccatttcgtccgcagccggggcatcgagatcaaaatcgtaccggcgggcgggcttttgccccatcgcctgcccgaacgcccgggtcagccgcaccgtgccgtccgcacttactgcgtaccggcacagggcatccgccgcaggcaggctgcggggcttttccgagaagcagtagtcgcccagctcggtcagggcaaaactgccgcccgccggggcgggcagagtgcccggcagcgccacgcagggcgctgtgccgtacacccgcaccagccgtgccgtctgtgccgaaaggggcaagatatccaatatcagttcgtttgcctgttccaccatgctgcgacctcgtttttctgcattcattcagctttcagtataccgcgaacagggggtgattgtccagtgcagagaaagatttgaacgggtctgtgcaacggggcgcggcacccggcagctctgccggtactccccttttgtcacatctcgttcaagttctctgccccgccggtgctgttaaacggaattgcgggataaaacaaaaaagacagctatcaaaagctgtcttttttgtggtgcagtaaagcaatccaaatccgaaccatttccctttgatgcggcttctgccgcttctccaaaggtgacggtctgtgttccttctttataattgaaggttatcaaaaccttatcgtcatacaggtaaatcgcattgatgaaggtatccaccagcgcctgccgctggtctttcaggcgcatatccagcttgcggaaccgcagcagccatcgcaatccaacttttgatcgtttgcaacatcgttggattgcatatcgcaaatatgctgttttcgtgttgcactattttcttaacttgcgaaaaaatcacagcagtgcgttttccagatcactcagcatttcgctcagtgcctgaatgccgccctctgcggtgtaccagacattcgggtgtgccagataaacgacgtggccgttcttgtaagcatccgtgctcttgaccagctcgttttccaggatctcctgtgccatctgtgcgccatcggtgccaatggctgcatcacgatccattgcgaagatgtagtcggggttcttgtccacaatgaattcaaaggaagcctcgttgccgtgggtcgaggtgtcaatattggcatccacgccgatgttctcaaagccgatctccttgccgatgatggagcagcggccatcgttgcccagaacattgaagctgccgctggtggtcatgccgacgatggcagtcttgccctctgcaaaggctttcagggcgtcgatgcggctgtcaaaatccgccatcaaagcttccacatggtcttccagaccaaagatagaagcgatggtcatggcgttttcacgggtgctttccacaacgcccttttcggcgtcggtcgcaaggaaaacaacgggtgcgatctcgcacagggcatcataggatttggacaggcgtccgccgataaagatgatgtccggctcgcaagccatgactgcttccatatcggcttccttgatgttgccaaggttcacaatgctgtcattggtgacatagctctgaagatagtccagagaggtggttgccgtaccgaccacacggtcgccaacgcccagttcatccagaatgtccagagaagcaaggtcgaggatcgcaatgcgctgcgggtcaaagggtacttccacatctaccagttcctttgcaccgttgaacgccttgatagtcaccgactccggcaccgcttccgaggaagtggtagcttcgctggatgcagccacagaggatgccacggagcttgccgtggaggaggaagcgccgcaggcggcgagaacacccgctgcactcacagcggccatagcggtcaaaaacgaacgacgagaaattttcttcataagaatgctccttttaaaaagtactgaaatcaataatatatcgacaaaggcttgccttcgatctgcatgatctcaaagtctaccttgtagatatcggacaggttttctttggtgatcacttcctgcacagtaccgaattttgcgatttttccatccacgaaggcacagatgtagtcggaataaaacgcagcatagttgatctcgtgcagaacaaggatcaccgttttgcccagctcatcgcacaggcggcggacgatgcgcataaggttggttgcatggtaaatatccagattgttggtcggttcatccagcaggatatactcggtgtcctgcgcaatgaccatggcaatataggcacgctgccgctgaccgccggacagttcatcgatgaactgctcctcaaaatcgcccagttccatgtaggcaatggcacggtcaatgatctcgttgtcctcttgggtcagccgcccgccggaatacggaaagcggccaaacgcaaccagctcccggacggtcagcttcatctggacattgttggattgggtcaggatggcgagccgcttgctcagctcccggcttttccagcgcgtgatctctgtcccctcaaaatccacaagaccgctgtcccgtgcgatcaggcgggacagcattcccatcacggtggattttcccgcaccgttcggaccgatgagggaaaggactttgcctttcggaatctcaaaactcacgccatcgacaacggcttttccatcgtagcgtttggtgatctcttttacaaacatggtgttatgcctttctctgggtgagcagcagatacaggaaatacacgccgccgcccacggtgatgaacacgctgaccggaaccgagtaaacgaacacccgctccaccagaagctgtccgccgatcagaacagccataccgaacaaaacagagccggtgatgagctggctgtgccggtaggtgcgcaggaactgccgggaaaggttggcaatgataagccccagaaatgccagcggcccgaccatagcggtggctgttgcaatgtacagtgtgacccccagcagcaggcggcggatacagcggtcatagtccacacccagattgatggcctgatctttgcccagtgtcagaacgtccagcagcacaagctctttccggaaggcaaaggcgaccagcgccagaaccacaacggacagtaccagaatcgccgaattgacattggaaaagctggcgaccagatccgtcagcagcgtgtcgtactcgttggggtccatcacacgggtcaaagtcgtctggatgctggaaaagaacgaggtcagcaccgtgccgatgagcaggacgtacagaacattgtggttcgttttccggaacagatagctgtagatcacggtggcaacagcgcccataatggcaaggtctaccgcaaaggctgcgttggcattgaccgccagaaaactgcccgaacccgccacaaagaacaccgctgtgtggatcagcgagtaaagctggtccatacccagcaggcagggcgtaacgatggtgttattgatgatggactgaaacacgatggaggcacttccaatggcaaatgctgtaatgagcatggcgatcagcttgggcgtgcggatgcgcatggcgtaggcaaataatttttggttttcaaagtggacccccactgtcatatagcccgcgcaggccagcagaacaagaagcagaaggatcagcaggcgcagatgatttttatgcgttttcatgctgcacctccggttttcttggcagctttgcccagccggactgccttgcgtccatgccgaagccgatacagcagcagaccgacaaacaggatactgccgatgacgccaacgatcagctcgatgggcagctcgtaggggtagatcacaacccgcccgatcatatcgcagaccagcacgaacactgcgccaaacagagcggtatccaccagcgttccgcggatctggtcacccttgaacattgctacgatattgggcacgatgaggccgatgtaggagatcgagccgaccacgacaacaacggatgccgtgatcatggcagcaatggtcagacccataaacagcaccagatcatacggaacgccgaggttctgcgaaaagtcttttcccatgcccacgatattgaagtggttggcaaatacaaatgccagaaccaccagcggtaccgtcagccagacaagctcataccgcccacgaatgacggtggaaaaatggccgaccagccagctggaaagagcctgtgtcatttcatatttgtaggcaagataattggtaacacccattacgatgttggagaacatgatgccgaccagcgggaccatgacaacatccttgaactggatacgctggatgaaccagacaaagatccatgtgcccagaacagcacaaacgaaggaaaaggcagcacgtccccacagggtagaacccggtgcaaacagcaaagccagcagaatgccaaactgcgcagaagagatcgttgcgcctgtggtgggcgaaacaaacttgttcatgcagagctgctgcatgataagccccgccacgctcatgccgatgcctgtgcagaggatggcaagcagacgcggcaggcgggagatcagaaagatctcccatgtttctacgctgcctgtaaacaggtcagaaggccggatgtccagcaccccgacaaacaaagaacaaaccgaaagaatcatcagcagaacgccgagaaaaacggtggaacgatgattacgaatgaaaagccctcctcaagattagtgcaaactaacttttttgaaaataaaaagagaccgcctgtgtgtgaagaaactggtcttacgtgttcacacacagcgcgttctgctgaagggattatatcataaggcatcgatgggtttcaagtggcaaactctcacgaaggttttacatagcaaactgtccttctttgttgattcctacaaagttgctccgaacaaaaagagcctttgcatttgttggtaaaaatcaccatgcggcttcagcgcaaaacttccagcagacgcctgccggcttcctgctgcgattccccaaacgccaccgccagctcctcccgcaggacacgctctaccatctggtaaaagtaggtatccatagcgttgatctttcggccgcggctttgctgctgggtctgcttttgccccagctccttgaacagggtcaggtattggtaaaaatcattggtgtgcagcagtgcctgatagtgttctgccagcgctgtctgtacccccgccgggataggcagcttctccgctttgatgcgtgcaaggtcggcttccgcctgctgtgccggggtcaccggacgcagcgccgcttccttttccgtggggatatagctgcgatcgtgggaatccgaaaaataaggccggagggtgtaatactctctggcgggctcatcgcaaaagcgccgcagcccgaccccttccacctcgtgcactcccagatttccgtagaccaccagcgctcccgcttgaaaccgtgacatggtattgcctctttcccttgtatggaaagactgcaaaaacagactttccagcgtaattttactctttactttattgtaccacggtaggttggcgggcttcaaagggcatcttccacaaagtttgcctcgtgcaatctgcgcagaatgcccagtacaattcttgtgcaaaactgcctttgcaaattccagacaggcaggctataatgatttcgtacaacgagtagcactcatgcgtaaaaccggttgcatgagagctgcccgttgtttttttgtcctcaaaatggaaaggtaaggtgaatcccatggaaagttccaatcagtttctcggcacggaacgcatcggcaagctgatgcagaagtatgcgatcccgtgcattatttcgctgctggtgggtgcgctgtacaacatcgtggaccagatctttattgcaaacgccagctatctgggctcctacggcaatgccgccaatacggtcgttttccccctgacggtggtagcgctggcaatcgcagtcatgatcggtgatggctgctgcgccttcgtcagcatcagccttgggcagaacgaagtccccaaggcaaagcggagcgtcggcaatgcggtggtgatgtgtctggtcagcagcattgtgctggccgcgctctatctgatttttgcggacaccattcttgccatgttcggcggaacggtcaacgccgagacctaccaccactcgcaggagtatttcttctatatcacgcttggcgtgcccttttatatgtttgggcaggccatgaaccccatcatccgcgcggatggcaacccccgttttgccatgatctccacccttgcaggtgcggtgctgaacatcattctggaccccatcttcattttcggcttccgctggggcatgatgggcgcagcggtggctaccgtcatcggtcagctggtcacggcagcgctggcagtgtggtatctgctgcacatgaagatcattcgccctgaaaagggtgactaccggctgaaaggctccatctgcggccgtaccctgacccttggcatgaccagctttctgtcccagatcagccttgtggcggcaatggcagccatcaacaacatgatccgcaaatacggcgcactggatgccgtgttcgggcaggagcagtacgcccagatccctatggcagttgttggcatcgtgatgaagttcttccagatcgtcatctccatcgtggtgggcatggcggctggctgcatccccgtggtgggcttcaacatgggcgctaaaaagcccgcccgtgtgaaggagctgttcacgaaactgctgctggcagagaccgcagtgggtgccgttgcactggtgctggtggagggcttcccgcgtcagctgattgccctgtttggtgccgccaacgagagcgtttactacaccgattttgccgtgaagtccttccgcatctacctgtgcatgatcattctggcctgtgtcaacaaggcgtgcttcatctttttgcaggccatgggcaaggcggcggaatccaccgccctgtccatggtgcgtgaggtggtgttcggcgtgggctttgccctgctgctgccccggttctttgggctggacggtgtgctgtactccatgcccatgtcggatatcctcaccttcctgattgcaggctatctgatctgcaagacctaccgtgaactgaacgggaaaggagaagtctaatggaaaaacgcatcatcatgccgccaactatcatattgcactggacagcggggtcatcggcatcgaaaaatgtgccaaggtcattgaaaatcttgcctgagccgtaaattccggcacgatccatgagccaataaaacaaaaatccgaacccttctcttatcgagaaaaggttcggattttcattgtttggtgcggataagaggacttgaacctccaccgagttgccccgattagaacctgaatctaacgcgtctgccaattccgccatatccgcatattctgttgtgttcctgtgccgtggcgccgggaacgatagttattataccagatacaaaggaaatgtcaaggcttaatttcaaaattattcgacaaatttttgcagcaaagttggtgcactctggatagcggctgtggggcgctttttagggcagattatggtacaataaactatacgtccgggcaccgcccggcgattacggaaaaacgagggaaaacaatgctgaatgtgattatttttctggtgggcgcgctgatcatgttttacatggcgctgcgcagtgtgcgggcgcggcagcagctgcgcaccaagggcgtctgcgtacaggccacggtaagcggcacggtgcagagccgggacggcgctgcctatgtgctggagtttaccaccgcaggaggcagccaccggctgcaatatcccaagcccgccaagggcaagccctttgccgagggcagcgtggtcaccctgtactacgacccggatgccccggagaagatgtttgtggagggcgacaagtccgtgctgggtgccgagctgctgtacactggcatcggcgcggcgctgctggtgctgatggtcggcatcatgaaccgctgagaaggagggacaccgcatgaaactggaacatttcggcatggctgaaccgggagactgccggttggtattcacggcaagcgcggaggagctggccgctgcgctggcaaaggagcaggccgccccggatgccccgcaggacgaggaagaactgctgacggcagcggtgaaccgcaccattctggagggctttgaccctctttaccggcagctggtgcaggagcagcagcttgtaccggtgaccgacccggattttgagctgctggcggtcaacaaggccgagggcttccgggcgggagcacagttctacaccctgccaccgctggagctgggacaggacaccggctttgtgcagcctatcgagccccacccgctgcgccggttgaccattgaactggagatcaaccgcaactacggcgatgaagaacgcgccgccgatgccgcaggcaaggccgcgctgcgcgaccgggtgacccgggagctctacgcaaagcgctgcgcacaggccaaggaccgggctgaaaaggagctggtctggcagctgggcgatgaggtgaccggcccggtgccaaagcggctggaagcgggcaactactttgccgagcagcggcagttcaatctgagcttgcaggcaaacggtatcaactttgaccagttcttggccgtgcgcgggcagacggtagaacagttccggcagtggctgcaccagcaggcagagcgcaagctgcgcagctggctggggcttttgctggtggctgagcgggagggcttacagcccaccgaagccgaggtgaacgctgctcttgcgcactggaacgagaagctggacggagagcgcaccttccccgccaacgacacccgcaaagtgcgccagcgccttgcccgggcaaaggctgcggcctttgtggtggcgcattccacccttaccccaccgccgtccgaaccccttgtgcaggaaccggaagcaaaataaaaatgatggttctcatgccatggcgggcagtctgcgggctgcccgccatagcttttttctgcaaaaaaagagacagcggcacgcccgcaggtacttccgctgtctcgaatgttattcttttattccagatgatgcttccggcagaatcttttgctcacccagtacatcccgccccacagcaggactgcgagcacaaggtagaccgggtttttcatggagctgaccagtgactgcccaaagacagccatcatggccaccatcagccccttgcccaaaaggacagcgcgcaggtagcgcttttcgtcaaagtccgacatcccgaaggcaaagtgcatgaaggaggtgggggtgaagggcagcagcgacagcataaacagggacgaggtgtcgaagcggttcacccactgctgtgccttttccagcttgggggagcggctggccaccttccagaaaaagcgcttgatgagccgccgccagaacaaaaacatgatgataccgcccagcgccacgcctgcccagctgtacaaaaagcccagcagaccgccgtgcgcggccacgttcagcgccacaatggcaatcagcggcagcggcggaaaaaaggactccaccatcgccagcaaaatgggcacaagggggccaagtccctcaaagcccgccagcagcgcctcccagtattccagtgttccaagctggtgtacccagcccatcagtgcggtttgcatcctgtgtccaatccctttctgtgcagcggtgccgggacgttcccgggcaggctgcaacatgtttagtatatccattctctatgacagagccgtgaacagagtgtgcatttttcgacacgttctgtactctgttatctatactacgaaacggaaggggattttcctgcctttatttttccgcagcctgcttttcggccttggcgcgcatccgctccagctgggcggtgcgcagtttttcccagcgggcaaggctttcggcgtccggcatctgggcgcagcgggcaaagctccagtgcaggccgtcccggcgggacagcttgtaccgctggaacacgccctgcccggcggcgttgccgctgccggtgcagctgggacactgacacagggtataccagctgttgctgccctttttcagccaaatctcgtccggctgcagggtggtgccgcactccgggcagggcatctggctgatcttggggtcagcccgccatgcgtactgctccacatagccgtgaaacaccgtaaagtcccggtagtcaccgggggtctggcacaggctctggcgcagcgcctcgtcctcggtggggtaggcggcaagcccggcgcgcagatccagcaggcggcagacatcggcggtgtacagagtgtccgaaagtgcatcgtggaaagggcgctccatggggatgcccatgcgggtgaccacgctttccagcgtcatgccctcgccctccttgcggggatgctcccgcagaaagacctgctgcaggtcgtaccagacggtgggcctggactcgtccagattgcacaggaacaggttctgcttgagcaccggcacgtcatccagaccccactcggcaaactcggcatccgggccgcaccactgcataaaacggcgcaggccctgcacgatgggctcgcccttgtccagatcggcctgcgtcaggccggtcaccttggcgatatggtgctgcaatttgcggaagatgcggggacgcagatggatggaaaaggtgtccagcacattggcatcctcgtcgatctttacagcgccgatctccacgatctcgccccgcagggtctgctgcaccccatggtagttaaaggtatacggctggtagccgatgttccattccagatcaaataaaaccaagttacgcggcattgctttgttagtcctctcgtaaaataaacttctccacggcctcagccacgccgtcgtggttgttgtcggcggtggtcacatagtcggcgcagtcctttaccggctgctcggcgttctgcatggccacacccaccccggcgtaggcgatcatggagcggtcgttcaggccgtcgccgcaggccatcaggttctcgcgggtcaaccccatgcggcgcagaagctctgccagactgccgtccttggccacgcccagcggcacggcctcgataaagaaggggctggaggggtacaggtcggcacggcccgcaaactgctgctgtccggcggcgcacaccgcgtcccggcgggcggggtccagcgtgataagcatcttgcacacggggtagttcacataggatgccagatcgtccacatggatcatgggcagcttggtggtaaagcactccttgttggcccactcgtccttgtcccgctcacagacgatgccctcgcggttataggtcaggatggcaatatcctgcgcggcggcaaaatcgcacagctcaggcacaagggcggggtccagcgtcttttccaccagcgtctcgccggtgcggcagtccacgatcttgccgccgttgtaggacaggatgcagccgccctttttgtccagacccagctcctcagccagcgtctggatgccggcggtgggccgaccggacgccagcacgatggtgacgcctttttcaatggcggcgtccagcgcggcgcgggtgcgcggggtgacgagtttctggtcattggtcagggtgccatccagatccagcgccagcactttgatatcagacatatttaaaagatcctctcattatagaagtatatctcagcttgctctttctattgtacaatgaaaagccccctgcttgcaacccttgcggggcggttcggtgcaaaaagtgcctcggcggcgggcgttacaggcagattttacctgttttgcccgcattttacaccgccgctcttccgtgcgccaaaggtttacctaagtgttacacggggctggtttcgccgctgcgggcggtgcgctacaatacaggtgttcccacaagaaatagtagaaccgccccaagccgggctgaaaaaagagaggatatctgttatgaagaatgcgaaaatttcccgccgcagcttcctgaaagccggtgccgtggcatcggcagtggggatgctgtcggctgcacccgtagccgttcacgccgccgaggccgatgcttctgccgcagcagacgaagagaacggtctgctggacgtgttcaaaaagcccaagtacgttttcctgttcatcggtgacggcatgggcactgcccagatccagtccgcacgcttttacaagggcactgtggacaacaacggcgctgtgaccgaggctgacctgagctttaccagcttcccgcaggtgggcagcgtgaccacctacgacagtacctccttctgcccggactctgcttccaccgctacttccatcgccaccggccacaagaccgagagcggcgtcatcaatatgtgcccctggacccgcgatgtgccctacgaaaccattgccgaaaagctgcacgcccagaagggctataaggtgggcgtcatctccaccgtgaacatcgaccacgccacccccgctgccttctatgcccaccagaagacccgcaagaactactaccagatcggcgtggagctggcaaactccggctttgagtactttgccggcggcgagttccagaaggtgaacggcgatggcaccggccccgacaaccataccgtggctgccaacgccggttacaacgtggtcaccacgcaggccggtgccgctgccctgaccgccggtgctggcaagaccctgatcattgccgagaatctgggcgatggcaaggccatgaactacgccatggacgctgccaacggcgagtggcagctgaccgactatgtcaaaaagggcattgaactgctgaacaacaagaagggcttcttcctgatgaccgagtccggcaagatcgactgggcctgccacgccaacgatgccgctgcttccatccacgatgtgctggagatgagcaacgcggtgcaggctgcggtggacttctacaatgcccaccccaacgagactttgatccttgtcaccgccgaccacgagaccggcggcatggccatcggctacaagaccaccaactacgacaccttcctgaccaatctggcacaccagaagatgtcctacgcaaagttcgattccacctatgtgcagggctacattgccaacaagaccccctttgagactgccatgcaggacgtgaagaacgtctttggcctgaccctgcccaccgaccccgctgccgccagcgcaggcaagctgctgctgaccgactacgaggtggagaacctgcgcaaggcctacgagcgcaccctgcaggtgggttcctccagccagagcaagatgagccagcaggattacgagctgtacggtacctacatccccttcagcatggctgtctgccacaccatcaaccacaagtccggtatggatcacaccacctacgcccacaccggtgccatggtcaacgtgtacgccatgggtgtcggtgccgagaagttcggcggtgtatacgacaacaccgagatctaccacaagctggctgagctgaccaaggtacagtaagctggtaagtaagagcgcctgattttcccacctcacttcctgcttcacttttccacagccaagcctcaaaatgtgcaaaaccctcccggccgaaagcgcaaagactgcgcccggcagggagggttttgttgtaatgtcaatgctgaatgcttcaggccttcatttcgggaaagccctccagcttggaggtgcagtgggggcagcgcacagccttgatggagatctcgctctggcagtaggggcacaccttggtggtgggctcctccggctcggcgggctcttcaggctttttgtgcagagagttgacaaacttgatcacaacgaacaacacaaaggccacgatgaggaagttgatgatggagttgacgaactcgccgatcttgatgctggagccgcccagtccgatgaccacatcggaaaaatccgccttgaagaacaggccgatcagcgggttgatgatgtcctccaccagcgcggtgacgattgcggtgaaggcaccgccgatgacaacgcccactgccatgtccagcacgttgccgcgcatggcaaacgctttgaactcttcaaagaactttttgatgccgctttttttctcttccatagataagctgctccttcttctcctttttttaccgcaaggggttattttatttttataatagcgtattatgcaacgatttgcaagagtaaagcaaccccttttatagaaaataaaaagtatcctctcccgcgaaaaaacgatcccggaaagtccgcagactttccgggatcatccaattcaaaaatatttttccgccggtttatgtgctataaagatgcttatgccgcgggctgctctgcggcagcaggctgcgggtcagcagtcaccgtaatggtgcggctgatggtactgcaggagtagttgccccccgccttggcggtctgggtgtaggtgccgggctcggtgggcacgccgctcattttgctgctgaaccacaggaaggtctttttcttgtaggtgtagcttaccttgccgttttcagccacctgtccgtccgagatcaccttggcggtcagatcagcgctttgcagctgagagacggtcatgctggccggggcatccgctgtccagctcaggctgacgttttcggtcttgggcttgatcttgaacatggcaaacccggcggcgttgatatcactgctttccagcgcgatggcaccggcaaagtacttgccgctgtccttgggctgctcgtccagatagatgcggctcagcgcaccctcgggcagatacttgcggattaggctcagcgccagcttcatgccgttggaaacattcttcaccgtggtcaggtagccggccgggacaaagaagctgacggtgtccatcaccgacactacttcgtccgccacccgcagcagcacgccgacatcgttgccgtcgatcagctgcttgagatagctgtatacattgaattcctcggcctggtccggggtctgggacatctttttgggcagggggatcagcttgagcagggtgcgcagcttatccgagatcatcagggtcacatagccgtaggcttcgccgctggtgcccagcaccacggcaatatactgggtgttttcgggccgggtctccacctccagcttataatcggagccgtagacaaggtttccggtcgcccggatgcggatgttgacgatatcattttcatcctctgcagcagtcagttctgcggcatcgggcagtgcctcgctgacaacagcggtgctttccggctgctgagctgccgccgaggcgggcattgccagcacaccaagcatcatgctgactgcgagcaggagcgagatccatcgtttggccttcatacgaaaacctcctttgttgtttggtattatacccacattttaccgcaaaataatcctagggtcaataacgggattcaagccgggcgcgtcactccccgatataggtaaagcggggctgggtaacgccgtcccgggtcacggtttccagccacatggcggcggggcgcacccacagcccgccctcgccatacagggcgcggtacaccaccatttcctcctcggtctcgctgtggcgtgccacgcccagcacctgatactcgttgcctttaaagtggcggtagcgcccggggcgcaccggatattgcagttccttcataacagttcctttctatttctacaaaaagggctgctgcgccgggcgggtgcagcagcccataaaacttattatattacagcgtgctgtccgttccatcgccgggggtctgctcggcagagtacagcagcatcaggtggttggccgaggcttccagctggctcttggcctgccgcagggcggcttcctcggtctcgttcatcttttcgggcttatccttgcgcaggcagcggcgcaggttggcaaggtcgaccttcacgcgggccttttcgtccttgtccagctcttttttgcacttggaaagcgcttcatccaccttgtaggccagcacctcggcctgattgtgcaggtccagacgctccttgcggcggctgtcctcggcctcgtaggcggcagcatctgccatggcgcgctggatctcgttttcggaaaggttggtgctgccggtgatggtgatgttctgctcccgcccggtggcaaggtcttttgcagataccttcaccacgccgttcacatcgatatcaaaggtgacctcgatctggggcttggacgaaaagcttgctcggatgccgttcagcttgaacttgccaagggacttattgtcccgcgcaaagtggcgctcgccctgcagaacgttgatctccacgctggtctgcatgggacgggcggtggtaaagatctggctcttgcgggtggggatcatgctgttgcgggtgatcagcggggtggcgactccgcccagcgtctcgatggacaaggtcagcggggtcacatccatcagcaccagtccctgcgctgccgcaccggtggcacccgccagcttgccgccgccctgcagcagtgcaccctgcaccgctgcgcccatggcaacgcactcgtccgggttcaggctgtggctgggctccttacccagcagctcccgcacctgccgctccacagcgggcatccgggtgctgccgcccaccagcagcaccttgcccagctggctggcagagatgccggcatcccgcaaggcgttctgcaccgggggcacggtgcgggacagcaggtctccggtcatcatctcgaattgcgggcgggacaacgcgatatccagatgatgcggcccgtccttgcccaccgcgataaagggcaggttcagctgggcagagggcgcactggaaagctctttcttggccttttctgcttcctccttcagccgtcccatggcggcggggtcgcgggtcaggtcgatgcggtcagactttttgaactcggccacagcgtactccacaatgcgctggtcaaagtcatcgccgcccagatgggtgtcgccgccggtggcaagcaccgtaaaggtgccgtcctcgatctcgatgatggacacatcaaaggtgccgccgccaaggtcgtagaccaggatcttctgcgcggcttcgttgtccagaccgtaggccaccgcggcggcggtgggctcgttgatgatgcgcagcacgttcagccccgcaatgcggcctgcatcctgcgtggccttgcgctggctgtcgtcaaaataggcaggcacggtgatgacggcctcggtgaccggctcgcccagatagctctcggcgtcccggcggatcttggcaaggatcatggcgctgatctcctgcggggcaaggtccttgccgtcaatatgcgcccggtagtccgagcccatgtaccgcttgatgctggagatcgtgcgcccggaattcgtggcgatctggcgctttgccgcgccgcccaccagacgctcgccgtccttggtaaaggccaccacgctgggggtggtgcgctcgccctctgcgttggtgatgaccacgggcttgccgccctccaccaccgccacacaggaattggtcgtaccaagatcaatgccgatcactttgctcatactgtttcctctgtttcttgtccgccgtatctgcgggctgatttttctccagtctatcttaccggacggctgtgaccattttttagtccaattgtaaagattctatgttatatgccgccggagccgtgggcggctcgtgggtcagcgcatagagcagctgctcggcctcctgtaaccagcggtcggcgtccggctcgtgctcccgctgcaaaatggtaaaggcctgctttgcctctgctgcctgcgccagcgcctttttgcgggaggtgtagcgggtctcgtactgcgccagccgcaggcagacccggggcgtatactcgatatccggcaccgctgccgcgttctgccgcgcccggcggtaccacagcagcgccttgccgttgtcgccccgggcggcgcagtcatcgccaaggttcaaaagggcgatgggctctccgctttcggctgcggctttccacagcttgcgcgcctgcgcagcgcttttgggtacgccgcgcccctgatacaggcactcgcccagcagcgatagcccggcagaactgccctgctcggcggctttctggtagcactctgccgctgccgcccagtgtccggcgcgggcagcttctttaccggcttcggcctcctctgcgccggggccctccggggtgtggcctgcgtgcagcagaccgttgagcagcgcaccgtccagcgaggcggaattgctccacgggtccagcaccacgccgtcgatgcccggggtatccagcgccagctgcatggcctgctccaaggtgcggtcagccatggggcggctgccggtactgcggtccgcaccggccgctgccaccgaggtaaacagcggcagccagcagcgtcctttatcgttgcgcagcgtccacaaggcaaggccgtcggccttttccgccgggatgggatgctctatccacggggcgggcgcaccctgcgccgaaagcgccgtctgcagcggcacaagcacatgggtttccagctccagcgcgtaattcaaagcgctcattaaagaccagaagctttcctcgttctgccccttgtacagcccctgcactgcctgctcgatggccgggcagccggtgccgcgcgggctgtacaccggtgcggtgcggctgcggcggctgcccaccgggcggaagcgtaccccgccgtctgttcgtcttgccattgtgttcaccatacttccctatcaatctcagctctagtataacaggatttggcagcttgtacaatgcaaaacgcagctgcggcactggattttcagtatacatcgcgttataataaggtgtattttgacccccaaaggaggaatttttttgaaccggatgcttggctacctgaagggctacgagcgcgaaagtgtgcttgcaccgctctttaagatgctggaagccacctttgacctgttcgtgccgctggtcatggcggatatcgtcaatgtgggcattgcagcacatgacctgcattatattctggtgcggtgcggccttttgctgctgctggctttcatcggccttacctgcagcctgaccgcgcagtacttttccgccaaggcggcggtgggctactccaccgcgctgcggcacgccctgtttgcccatattcagcgcctgagtttttcagagatggatacgctgggcaccagcaccctcatcacccgcatgaccagcgatgtcaatcaggtgcagagcggactcaacctgtttttgcgcctgttcctgcgcagcccctttgtggtgctgggtgccatggtcatggcctttacggtcaacgcccgggcggcgatgatctttgtcgtcaccatcccgctgctcagcgtggtggtgttcggcgtgatggtgatcacccgaccgctgtataagaccgtgcagacccggctggaccgggtgctgggcctgacccgcgagaacctgaccggcgtgcgcgtggtgcgcgcctttgataaggagcagagcgagatcgaccgctttgaggacgccaacgccctgctgaccgggatgcagctgcacgttggccacctttcggcgctgatgaacccgctgacctatgtgctcatcaaccttgccatcgtggcgctgctgtatgtgggcagcatcgagatcaacgtgggcggcatggcctccggtgatgtgatcgcgctggtgaactacatgaaccagatccttgtggagctggtaaaacttgccaacctcatcgtacagatcagcaaggcgctggcctgtgcaggccgtgtgcaggcggtgctggataccaagcccggcatgaccttcccggcaaagcttctgggcgaagtgcccgccgacaagaccggcgatgccgtgcgctttgaccatgtaggtctgacctacgccggggcgggcgcacccagcctgaccgacatcagctttaccgccaaaaagggccagaccatcggcgtcatcggcggcaccggcagcggtaaatccagccttgtgaacctcatcccgcgcttttacgatgccaccgagggcagcgtggagatctttggccgcccggtggccagctacccccgggacgctttgcgcggcagggtggcggtggtcatgcagaaggcgcagctcttcggcggcaccatccgctccaaccttttgtggggcaacaaggatgccaccgatgccgacctgtgggcggcgctggaaacggcacaggccgcagactttgtgcgtgcaaagccccttgggctggacgagccggtggagcagggcggacgcaacctttccggcggacagaagcagcggctcaccatcgcccgtgcgctggtgggcaagccggacattttgattttggatgacagcgccagcgcgctggactacgccaccgacgccgccctgcgcaaggcactggcggcgctgcccggggcactgaccgtgttcatcgtcagccagcgcgccgccagtttgcagcacgccgaccaaatcttagtattggatgacggccatctggtgggcatcggcacccacagcgccctgcgcagcagctgcccggtgtacgaggagatctacgagagccagttcaagaaaggggaggcagaagcatgagtgcaaaagcaaaaaataagctgaccccgcagcagcgcaaggccaccctgaaccgagtgctgcacaaaatccgtccgtacagcgcctttgtggtgtgcagcctgctggtggcggcggtcagcgtagccgctcagctgtatatccccatcctgtgcggcgatgccattgataagatgctgggcaagggcaatgtagatcttgccggggtgctgcgcattgcagtgagcattctggtggtggcagctgtagccgcccttgcgcagtggcttttgagcgtgtgcaacaaccgcatcaccttctcggtcagccgtgatctgcgcaacgaggcgctgcgcaagatccagaccctgccgctgtcctatctggacagccacccctccggcgatatcgtcagccgcatggtggcggatgtggacacctttgcggacggcctgctgatgggctttacccagctgttctccggcatcctgaccattttgggcaccctgctgttcatgctgcgggagaacgtgcccatcacgctggtggtggtgtgcatcaccccgctgagccttgtggtggcgggctttctggcaaagcgcagttacggctacttccagagccagagcaccgtccgtggcaagcagaccgcgctggtcaacgaaatgatcgaagggcagaaggtggtgcaggcctttggccacgaagccgagagccttgccgcctttgacgaggtgaacggacagctgcaggacgtgagcctgaaggccatcttcttctccagcctgaccaaccccgccacccgctttgtgaacaacatcgtgtatgcgggcgtgggccttgtgggtgcgctgtacgccgtgcgcggcggcatcaccatcggtcagctgagcgtttttctgagctacgccaaccagtacaccaaacccttcaacgagatctccggcgtggtcaccgagttacagaatgcactggcctgcgccgcccgggtgtttgaactgctggacgccgaagatcaggtgccggaggccgaaaacgccgccgcgttgcagccggacggccatgtgcagttacagaatgtttccttccgctatctgcccgaccgtccgctcatcgaagggctttcgctggacgtgcagcccggccagcgcatcgccatcgtaggccccaccggctgcggcaagaccaccctcatcaatctgcttatgcggttttatgatgtaaacaacggcagcatcagggtgtccggcaccgatatccgggatgtgacccgcgcttccctgcgcggcagctacggcatggtgctgcaggacacttggctgcgtgccggtacggtgcgggagaacattgcctacggcaagccggacgccaccatggacgaggtgatcgccgccgccaaggctgcccacgcccacagctttatccgccgcctgcccaagggttatgataccgtcattgcagaggacggcggcaacatcagtcagggacaaaagcagctgctctgcatcgcccgcgtgatgctctgcctgccgcccatgctgattctggacgaagccacatcctccattgatacccgcaccgaggtgcgcatccagaaggcctttgcccgcatgatgcaggggcgcaccagctttatcgtggcacaccgcctttccactatccgggaggcagatgtcatccttgtgatgaaggacggccacatcgtggagcagggtaaccacgaccagctgctggcacagggcggcttctatgccaagctctacaacagccagttcgagggcgtgcagacctgaggatgctgttgtatcctatccaatctgtaataacaagcagtcaaaatgcattttgttgattaaaacgcatcgaatagtcactcgttcataaaacgttaataatatattaacattcagtacaccacttttcggtatacatagggcaacaaaggcgcgcagtgcgccgaacccccgccaaaaagggcaaaaacgcgcagactgctgtggtgtgcggcggtcttggaaatgcccttggtacaggaaaggaaacgttacttatgaaaattggtttttgggaacttatcgtcatcgtcatcgtggcgtttgtgttcatcggcccggaccagctgcctgtctacgcaaagaagatcggcaagatgctccgcgagctgaaaaaatacaccggcgctgcttctgaggagatccagaagaacgtggtggagccgctgaacgagattcaggctccgctgaaagaagctgttgcccccctgaccgatatcaagaaggatatcgacagcagtatgcgggacgtgaccaagagctttaccggcattggcaagaccagcaaagaggaagccgccaagaagcaggctgagaccgaggaggtcaccgacctgaccgaggatgctgtggaggaactgcccgagcagcccgccgaagccccggctgaaactgtggaggctcccgctgaaaagccggagcaggccgctgccgaggccgcacagcccgccgctgagccggtggctgagcctgtgcaggaagcccctgccgcagccgaagaggctgccgaagctgcacccgctgaggaagcaaaggtgtaagcgcccctacttattgatggatgcacccgcgcccgcggttgccagatacattctgtaatacgcccgccacgcggcgcggcaagaaaaaggagatatttattatgcgtattggtactaatgagctgctgatcattctggttgtcgttctgctgatctttggacccaagaacctgccgaagctgggcaagatgttcggtaagaccatcaatggcttcaagaagggcatggaggacgaggacgccgagcagtccgaggagactgtaaagaaggctgataagaaggacgaagacgaggagtaattgtggctacaaacaaaaagcgcaaaaagaaagccgaagtcatggcagaggacggcagcatgacgctgaccggccatctgaaagaactgcggaaccggctcatcatctgcgcggtggtgtttgtggtgggcgtagtggtctcgctggcgtatgcagatcgtctgatcgatctgcttactgccatgggccgcgactattaccagttcgtgtccattgccccgcaggaaaaactgatgcagtatttccgggtgtccattctggccggtgtggtggtaacggtgcctgtggccttttacaacatctacgcctttgcaaagccgggtctgaaaaagagcgagagcacctttttcaagctggtcatgctgctgggtctgattttgttctgcgtgggcgtgctgttcgcctataagctcatgatgccgttcatgctgcggttcctcagcaccggcatcgagggtgctgagtacatccagaccaccaccagtatcgagagctacgtcaacctctgcctgaccatgttcatcatctttggctgtgtgtttgagatgccgctgatcaccatcatcctttccaagatgggcatcatcaacccgcagattctcaagcaggtgcgcggcgtggccatcgtggtcatcttcttcatcgccgctgtggtcaccccgccggacatcgtgtcccagtgcatggtggctttccccatggtgctgctgtatttcgtcagcatcttcctgagcggcatcttctataagccgcgtgatacggatgaggatgacgaggaagaagaggcgagcgaggactgatcccgcttccgttccggttttcatcaactgaatcaaacgccgctgcacggctgtgcagcggcgtttcttgttggcacggaaacaaaaaagctgccgcacagctttgtgcagcagcctatgagaaaataaaggagaaacgcaggttcaaaaaagattatttgcccagatgccagatatcgcggtcgtactcggcaatggtgcggtcagaggagaacatgccagccttggcaatgttcacaaggcacttgcgccgccagcccgtggggtcgcaggcgtaatcgctgagggcctgtcccttgcgcacaacgtaggcattgaagtccggcaaggtctggaaccagtccttgtggatcagctcgtcgtgcaggcgggtcaggttttcggcatgaccggcggccagcatctccggcccggtcaggaagctgatggcgcggcggatgttggcatcgccctccacccactgggcggggtcgtaatcgcccacggcgtagcggtggatgacctgatcggaggtctggccgaagatatagatgttctcctcgcccacctgctggctgatctccacgttggcaccgtccatggtgcccagcgtcagcgcgccgttcagcataaacttcatgttgccggtgccggaggcttccttggaggcaaggctgatctgctcggacaggtcgcaggccgggatcagcttttcggcggcggtgacgttgtagttttccacgaacaccacctgcagccacttggacacctccgggtctgcggcaatgaccttggagagggtcagcagcgcatggatgatgtctttggcaatggtgtaggcgggagcggctttcgcgccgaagatgctcaccatcggagcagcgggcaggtgccctgccttgatctcgtagtactggtgtatgaggtacaacaggttgagctgctggcgcttatactcgtgcaggcgcttggactggatatcgaacactgcatcggtgttcacgcgcaccttctgggtgtgcagcagccagtctgccagcgcttccttgttggcctttttcacggcggtcagctcgctgagcaccgcatcgtcatcgacaaaggccagcagtttttccagttcggcggcatccttgcggaagccggagccgatgtgcttttccagcgtggcagtcaggcgcgggtcgcattccagcagccaacggcggaaggtgatgccgttggtcttgttgttgaacttttccgggtacagctcgtagaagccgtgcagttcggagtttttcaagatctcggtgtgcagcgctgccacgccgttggtggagtgggtaaaatggatatccatgtgtgccatgtgcacccggtcgtccttgtcgataatggcaaggctctcatcctcggtgcgggtgcgtgccagcgcatccagcttttcgatgatgggcatcagctgcggcaccacggcatccagataggagcggggccacttttccagtgcttcggccagaatggtgtggttggtgtaggcgcaggtcttggtgacgatctccacggcctcctcaaactcgatgccgcgctcgcccagcagacggatcaactccgggatgaccatgctgggatgggtgtcgttgatctggatggcggcgtagtccgccagatcatggaagttgcagccccgggcggcgcactcggccagaatgagctgtgcaccggcagaaaccatcaggtactgctggtacacccgcagacggcggcctgcctcgtcggaatcgtccgggtagaggaagagggtcaggttcttgtcgatagcggtcttgtcgaaggcaatgccgtcatggacgatgctctcatcgatggtatcaaggtcaaacaggttcagggtgttggtgcgcccctcgtagccggtaaccgccagcttgtacagccgggcggtgtactccttgcccgccagttccaccgggtaggtggtgtcggtcttttccgcccagctgtgggcagtcagccacgggtcgggcttttcgttctgcacgccgtcctcaaaggactgatggaacagaccgaagtggtaccgcagacccacgccgtcgccgggcaggttcagcgttgccagagagtcgaggaagcaggcagccaggcgccccaagccgccgttgcccagagagggctccggctctacctcttcaatgtcggaaaggcgctttccggcagcagccagtgcagaccgggcttcgtcgtacagccccagattgatgaggttgttggacagcagcttgccaataaggaattcggcgctgatatagtacagcttgcgcccggtgaccggctgcacgcggtcggcgctcttctgccgcaccagttccagcagtgccagatacagctcctgatcggtgcagtccgccagcagcttgccggtgatactctgtaacgtttcggtaaagctcataaaagcatcctcctttgctagggtgtatctgaaaagtagaaaattcagtctatttctttgttttcagatacaccttacggaaaacaggtttgacatctgtacttcaagatataccacatagaacgatcaaaatcttgcctaaaaagtgcaaactatggtacaatcctatcatcggaggtgagacgatgcaaaatcaggcttctttgcaggagacaaaacagcacggtgcggtgcgctttccgttcaatctgtacccctgcaccattccgggggatttccagcaggtggcactccactggcacgagagcatggagctggtctttgtcaagcagggcatggggctggtacaggtgggcgtggtgacctacccggcctaccggggggatatctttatttttgccccgggcacgctccacgcgctgcggcaggcagagggacagcgcatggaatacgaaaatatcatctttgagccggagttgctgggcggtgcggaggacctttgtgccgaaaaatatctgctgccgctgcaaagcgggcggctgtcgctgccggtgcgtctgaccccgaacgatttgtgctatctgcaagccgccgcctgcctgcgggagctggaagatgccaaccgcgccaagcgccccggctacgagctgctggtaaaaggggcgctgctgcgctttcttgccctgctcattgcacagggcaggcagtgtctttccaccgaaaccgccgacacccagcggctgaaaaccgtactgcaatggctttcggcgcattatgctgagccgctccgggtagccgatgccgccggggtctgctccttcagcgccagccattttatgcgctggttccggcagatgaccgggcagagctttattgcctttctgaatgagtaccggctgaacaccgccgccgaggcactgcaaaccaccgatgagaccgtgctgaccatcgcctcccggtgcgggtttgagaatctttcctattttaaccgggcgttcaaggcgcatttcggcatgaccccccgggactaccggaaaaaataagcaaagcgcttgacagttgcggctgtatggcgtatgatgtgggcagcggcttttcccggagtgaaaagttagtctattctaactattattttataagatattcttgaaagaaggtataaaaatgatccagacgaccgtagaagtaggcggcatggcgtgttccatgtgcgaagcccatatcaatgacaccgtgcgcaatgcatttcctgtggataaagtctcgtcctcccacgccaagggcaagaccgtgatcctttccaaggagccgctggacgaaaacgcgctccgcgccgccattgaagtcaccggataccatgtgggcaccatccacagcgcaccgtatgaaaagaaggggctgttctcctttttcaagaagtgatatgtccccccgtgttcagccttatcgacaaaaataaggcgcaatactgatctctaccaaccattcttcttttcacctcttttttgttttccacccacagagaaacacccccggcagccgcaatggctgccgggggtgtttctgtatctttagatttgcactcggctttagtggacaaagcccacgaacaccgggcagagcacggcggtcagcacaccggctacggcaatggaaaggccgctcatggcaccttccacatcacccatctgcagcgccttgctggtgcccacggcatgggctgccgtgccgatgcccacgcccttggcgatggggtcggtaatgtggaacagcttgcacacggtctcggccagcagtgcacccacgatgccggtgacgatgacgatggcaccggtcagggcggcaatgccgcccagctcagctgccacgtccatgctgatggcggtggtcaccgacttcggcagcagagtagcgtactgctcctgggtcaggtccattgccagcgccagtgcaaaggcgctgcccagactgaccagcgtgcccaccgagatgcccgcgatgatggcgggcgcgttctccttgagcagatccagcttttcatacagcgggatggccagcgccaccgtagcgggcagcagcagatagcttaccggcgcggcgctggttttgtagtccccgtaggggatattacacaccgacagaaaaatgatgacaaaaatactgcccagcagcagcgggttaaagatggtcttgccggtcaccttattgatgagcacacccagcccaaaggctgccagcgtaagcagcacgccccatgccacagagccggtcagaaagtcgttcagcagctcagtcatggtcggcctcctcttttttattgcgggcggtcagcgcctgcgtggtgcggcctgcggccgccatcaccagcaccgtcaccggcagaatggcgatcaggatgggcagcagcagctgtcccatctctgcccacagctccatgatgcccgcagcagcgggcacgaacagcagcggaaaaataccggtcaggtaggtgccggtctccttgacctgctccagctttacaaacccggtggtcagggctgccagcagcagcaccagaccgtacacactggcaggcaccggcagcggcagtaccgcgtgcagcacctcgcccagaaaacaaaacgcgagaatgcgcccgaactgaaaaatatacttcgtgtcagaactcccctttctggtcttatggtcttataacgaacagacaacaggctttttgcccggaattttctgtctcacacaaagtaaaagtataccgcggactgcccgctccatcaaccgtaaatcttgccaagaagttctgcaccttttgcgcagaactgtacaaaaaaacgcaccgggccaaggccggtgcgcagaatcaattattcctgataggtaaaatgacagcatgggtaattcgagcatccccagaaggtttgccctgcgtgatttcctcgttgagctaccctcataacaagctgtccgccgcatcgcggacaagtccaagttccatccgcttgaacgactggatattgctttgcctgaacgtctcttatatgggcgtctttttgccagccgcttacttctgtgaaattcacaagtattgcataaagtgcatccattttctcatctgatagctgagtgcctgtacaccgagcattatactcaatatcccttcggagatatagggcataggtcacatgatgctttccgcttgtgagctgaatgttctttagttcacaattgtttccaaatactacataggaatagtatgggacagtatcatccttcagcagttccatcaatgcgcaaatatgcgtctcattctgccggagagggttataaaaggggtacttttgcgttgtatgaaattttcccctcagacattgcgtccaatgttcttgctcttcattgccgaaaatccagccactgtaatttttggattcgattacataaagtccggactcgtgcagaaagaccatgtcaatctcagttgttcctttttggcctaccgggatataacaattcggtaaaagagctttacgaccgtggactttgttcagggctttataaataatgttttctccagcgtctccccgttcctccgggctacgaaaatcccatcgaaattgctcaaacacgataatgtcctcaaatcacataatcgttgccggcctgatccggcagggcaaggtctgccagtgtgatcttgccaaaatagtccgagatcagatcgttgagccccttccacatctcgtaggtgcggcagttggccatccgggcgcaggcagaagccccgggggtcaggcagcttaccggggcaaggctgccctcggtgagcatcaaaatctcgcttaccgtgtactgatccgggctgcgggtcagccggtagccgccgcccttgccgcgcagcccctccagaaagccgttctgcaccagtaccttgaggatgttctccagatacttttccgagatctcctgccgggcggcaacttcctttaagggaacatatttttcagactgatgctccgcgaggtcgatcatcacccgcagcgcatagcgtcctttggtcgaaacgatcatgatccgtacttccttccggtcaaaatttattataacccattatacaacagggtaagtcacttttcaatcctacttttttcaaaaaaccccttgacaagcagggaaaacagggctataatgccatcaaacccacaaacgatgttggttgaaaggtttagagggaatcacagccgggcaccccggcacaagacagggccatacgccccgtaacgatatcagaaagagggacaagtattatgagcaagatctataccgccgcagatcagttgatcggtcacaccccgctgctggagctcagccatattgagaaggaagagcagctgcccgcccacgttattgccaagctggagtacttcaaccccgctggttctgtgaaagaccgcattgcgaaaaagatgatcgacgacgccgagaccaagggtctgctgaaggaaggctccgtcatcattgagcccacctccggcaacaccggcatcggtctggctgctgtggcagctgccaagggctaccgcatcatcatcgtgatgcccgagaccatgagcgtggagcgccgccagctgatgaaggcttacggtgccgagctggtgctgagcgagggtgccaagggcatgaagggtgccattgccaaggccgatgagctggcaaaggagatccccaattccttcatccccggccagttcgtgaaccccgccaacccgcaggcacacatcgagaccaccggccccgagatctgggaggataccgatggtaaggtagatatctttgtggcaggcgttggcaccggcggcaccgtgaccggcgttggcaagtacctcaagagcaagaatcccgatgtcaaggtggtggctgttgagcctgcttcctcccctgtgctgagcaagggcactgccggtgcacataaaattcagggcatcggcgcaggctttgtgccggacgtgctggataccaccgtctatgacgagatcatcgccgtggagaacgacgatgccttcgccaccggccgtctgattggccacaaggaaggcgtgctggtaggcatctcctccggtgctgccgtctgggccgccatccagctggcaaagcgcccggagaacgcaggcaagaacatcgttgtcctgctgcccgataccggcgaccgttacctgtccaccccgctgtttgcggaataatctcaaaaaactctcctctcccgctctgcaccccgcagggcgggagtttttgtttgggaacaggacgatttgaatgcgctccgcgttgctctgcgcatagtcagcggaagaattatttttaactcgggattctgaaaagcctgcgggcttttcagaatccccttttcacaggtggggtttggaacgaactccctcagtcaaaacctgacggttttgccagctccctctgggagggagcctctggcgcacccgcaaactttgcactttagccggaaactgtaccgccatgccaaaggccccatcttagagggggctggcatcgcgcagcgatgactgggggagttttctccgtccactcccctttccccacgccggattttatgctacaataccggtaacaaaaacgtttggagaaacgcccatgctttattatgctgcccccatggaggggtttacagaccgggtctggcggcagacccatcagaaatggttcggcacacaaggcgctgccgaccgctattatgcgccgtttatctccccgccggagaaccgggtgctcattaaaaagaagatggcagagcttgccccggcggcaaaccccggtgcaccggtcatcccgcaattgctggcgaaggacggcgagctggctgcttggatgatcgggcagctgcgggcgctgggctatactgaggtgaacctgaatctgggctgtcccgccgggacggtgaccgccaagggcaagggctccgggatgctgcgggacccggccaaggtagacgcctttctggacggggtattctcccgcgccgaggggcctgtctcggtcaagacccggctgggtgtggagaagccggaagagtttgccgccattctggaaatttataatcgctaccccatctcggagctgaccatccatccccgggtgatgcggcagcagtaccgcggacaggccgaccgcgccgcctttgcggctgcgctgccccggtgcaccatgccggtgtgctacaacggcgatgtgaccaccgccgcccagctccacgcgctggaagaagagtttcccgccctgtccggcatcatggtggggcgcgggctgatcgcagacccggcgcttttccgcagggcgcggggcggtgcgcccgccgccaaagaggagctgcggggctacctgaccgacctgtaccacggctacactgaactgttcggcagcgcgggctgcgccatcagccggatgaaggggcactggttctacctcatccactgctttgccggggcagaaaagctggaaaaacagctgaaaaagctgcgggagccgtgggagtacgaggtggtggtgaaccagatcttcaccctgccgctggtggaaaacaattaaaatgtgctccgctttgctctgcacatattcagcggaaatcatatttataatttcgtgtttgtcgcactctgaggagtgctccaaacacattttcacgggtggggtcgcagaggaaaactgcatctgcaataaaaaagcccgccgtcttatgcagacagcggggctgaaaaggaccgtattacacgttgaggtagctgcgcagcatagcctgcagcaggtcgtcacgatccaccttgcggatcatagcacgggcattcttataggtcgtaatgtaggtagggtcttcggacaaaatgtagcccaccagctgattgaccgggttatagcctttttccttcaaagcatcgtacacctgctgtacgatctcgtggatctcatagtcctttttatcgtggatggagaaaatcgcggttgcgtctcccacgcaatacacccccttcggttgaaactagtctcattgtacacgaaatgcgccgaaacttcaagataattacgccggatttgcacatcctgtacaaaatttccagcaatgttccggcaagatgaacgatgtccgggcggcattctgcccgcgaaaggagcctttgtatgctttacggcatcggctgcgatctgtgcagcctttcccatctggaaaaaagcctttcctctgcccacgcagcggcctttgtgcgccgggtgtacggcccgactgagcaggcggcgctggggcttttggaaggctctgctgcgccgctgaacgcccaccgccttgccagcgccgccgcagattttgccgccaaggaagcctttctcaaggcggcaggcaccggcctgcgggagcctttttctctatgtgagatcgaggccgtccggcaggaaaacggtgccccggcctaccgcttcagcgggcagaccgccgcatgggtggcgcagcaccgactgcgcgcccggctctccttaagccacgagggcggcatggcgctggctttctgcacgctggaagaggaaaactgaccgccctttgtgcatacaatggaatatcgcccccgcactgcataagccgcacccggtctgcgcatactgagagcagacaggatgcgccggacgcatcacatagcggggcacatcctccagacaaacaggagggagattccatggaggtacacagaggagaagttttctacgccgatctttcgccggtggtgggctcggagcagggcggtgtgcgcccggtgctgatcgtacagaacgagatcggcaaccggcacagccccactgtgatcgcggcagccattacatcccggctggacaagacccgcctgcccacccacatcaacatccgggcggcagacaccggccttgccaaggacagcgtggtgctgctggagcagatccgcacgctggataagcaccgtctgcgggagcgcgccgggcagatcaccgccgccgaccagaagcgggtggatcaggcgctggacgtaagccttgggctgagctcgtactgaaattttatttataaagcagagacaccggagcgtccacagacgctccggtgtctctattttttagtattactcgatcaggccgttgagcagggtcaggcacttgcggctgtgcagcttgcggatggccttggcttcgatctggcgcacacgctcacgagtgacgccgaagtcgcggccgacctcttccagcgtgcggggacggccatcatccagaccaaagcgcaggcggatgaccttttcctcgcggggggtcaggctcttgagtgccagattgatctgctgtgccaccatggcgcggtcggctgccttgccgggtgcttcggcgttctcatcggcgacaaaatcgcccagagaggaatcctcttcctcacccacggggctttccaggctggcgggctcctgtgccatgcgctggatctcgcgcacgcgctccacgctcatatccatggcctttgccagctcctccggggtgggctcgtggccgttctggtacaccagctggttggtggcctgacgcatccggttgatggtctccaccatgtgcaccgggatgcggatggtgcgggcctgatccgcgatagcgcgggtgatggcctgacggatccaccaggtagcgtaggtagagaagcggaagccgcggtcgcagtcgaacttctcggcggccttgatgaggccgatgttgccctcctgaatgagatcaaggaaggccagattatggccgacatgcttcttggcgatggacaccaccagacgcaggtttgcctcgctcaggctgcggcgggcgttcaggccgtcgcggcgggtcttgagcagctcctgacggcgttcctcgctcagggggccgttctccacggcctccatggccttttcctcgtctgccttttcctcggcatcctcggcagacttttcgccgtcctcgtccagatcctcggtgtagctgcggctgttctcgtcctcctcaaaggagaagcgggcgctgttcttcttgatgtactccggtgcgccgtacttctggcggtctgcctgcaaaatgtgtgcagcctcggcaccggcatggatgcggcggctcagctccacctcctgctcggcgctcagcagcgggatctgaccgatctgcttgaggtagttcttcaccgggtcgtccagcagctcgtccatggcagccttcaggtctgccgggttctcctcggcatcctcttcgttttcatcggcaaggcccatgtcatcgttgttgttctcggcgttctccacctcagcaatgatgctgtccacgtccagactcggctcgttctcttcctccaggaccttaatgccgcgctcctccagcagggtgtagagggtgtctacatccatgcggcattgtgccgccagcgccttggcctcctgtgcagagagggtgccctcgcccttagtcaacagttccttcaaagtcatgcccattttttctctccttcccactccggggaatttcctgtaatattgccctgtgcatcagatcacaaggccgccgttcaccccgaacacctgtccggtgatgtatccggcatcctcgccggccaaaaagaccagcagctttgcaacttcttccggggtgccaagccgacccacaggggtctcctcggccagcgccgccttgtcctcggcggtaaaagccgccatcatgtcagtctcgatgaccccgggcgctacgcagttcaccgtaatgccgctggggccctcttccttcgccagtgccttggtcaggccgatgagcccggccttcgcggcggaatagtgcacctcgcagctgccgccggtctggccccacatactgctcacggtcagaatgcggccctgcttgcggcggatcatgccgggcaatgccagctggcacaggtggaacgcgccgctcaggttcacgtccagcatccgctgccactcctccggggtgatgtcggtaaacagcttctgctgcgcgatgccggcgttgcacaccaacacatccaccctgcccatggcctgctccactgcgtggaacgccagctcacagctggcgcggctggctacatcgcactggatggcgatgcacccgggcagctgctgttccagcgcagcggcagcagctgcgttctggtggtagagcaccgccacctgataccctgctgccgcaaaggcgcgggcagcggcagcaccgatgccccggtcgccgccggagatcagcacccggcgcgccgcagcgggtgcggcaggggcaggccgctcttttacaggctgcggcgcaggcgcttcgggcagctccaccgcaggcggctctgcgggcttttccagcgtgatcacccgggtgggttcgtccaccaccggtttcaccggcgctgccggctttgcggccggtgcggcaaggggctccggtgcgctttcttcctccggcacctgaaaggtcagttcaaactcgtcctcgtacaagagtgtatccctcctgttcggtattctcggctcggcgtaagtgcgcccagccggaaaaaccctgtgcccatccccagacagtgcagcgttccgtttatgtgtccggcaaaggtccggtgctttggcgtgcctgcctgtacttacgatgggtttcgacaagattccattgaataatataccacaatccagcccaaaaagaaagtgggaactgcaattttttacgcagttcccactatttttccttattttcccctgttttcgggcaccgggggcttccagcggggtctgcccgcccgcttttcccgcagggaaacaaaaaacgcctgcaaaagctgctgcgcctcggcctcccgcagccccttttccactaccggatggtggttgaagggcagcgcgaacaggtcggtcaccgagccgcagcacccggccttggtgtcggcagcaccgtacaccacccggcgcagacggctgttgatgatgccgcccgcgcacatggggcagggctctaaggtgacgaacagttcgcactcccacagccgccagccgcccagcgccttgcaggcagcgtcaatggccagcagctccgcgtggtgcaaggcgtttttctcggtctcccgggtgttgtgcgccgtagccaccacctcgccgtgccgcgccaccaccgcacccaccggcacctcgcccaaggcggcggctttggcggcttcttccagcgcaagacccatcagttcaaaatcggtcatgtatcccatcctctcatcccatcgccagtaccagcagattgtttgcactgtgcagcagcatccccggccagagatgtccggtgcggtctgccagccaccccagacccagcccgcacaccagcgcatagaccatggcagcgacgctgccgtgctgcaaggcaaacagcaccgcctgcaaaagaatggcctgtcccctgcccagcggctgcgcccggcgctgcaccgcgccccggaacaccccttcctccgccagcggagccagcaggcagacccggaaaaaccgcgccgcgccgccgggcggcacgggcagcagcaccgccagcgccttgcccgccagcagataccctaccgcccagccaaaggccgaaagcagcgcggcggtgcggggattcagcttgtgcatggtcggtctcctcctgctgtgattcgttcccggttatagtaccatatctgccgccgggtgcgcaaggtttgggcgttctgtcgtggcaaatttatgcaaatcattgacacatcgccctaaatggtggtataataatttccaacctttttagcaaaaacgttgcgtatactgtattttaccggtagaccggaggtattattatgatccgtatcctcaccgattccgcgtgcgacatcctgcccgccgaggcgcagcagctgggcgtgaccgtgatccccctgaacgtgacgctggaggacggcaccgtcctgcgggacggcatcgacatgacccccagcgaatactatacccatctggcagcctgccgcaagctgcccaccaccagccagcccagcccggagcagttcgagcggctgtatctggacgccgctgccgccggagacgaggtgctgggcatctttttgtccgatgcgctgtccggcaccggtcagtgcgccagacttgctgccgaccttgccaacgtggataatgtggtgttcgtgaacaccgagaacgtctgtctggggcagtccttgctggtgcggctggctgtgcagctgcgggacgccggcaagacgatcacccagatcgccgccgatctggaaaaggccaagcagcacctgcatctggtagctgccgtggacgatctgaagtatctgcgcaagggcggcagactgtccgccgccgcagctgtggcgggcggtatgctgggcatcaagcccatcctcgccgtcatggagggcaaggtggcgctggccggtaaggcacgcggtctgcccggcgtgtatgtggcgctgttcaagaagatcgacgagatgggcggcatccacccgggctacaccccgctgctgggctacaccgtcaaccaccgggagctgcagccgctgctgacctacctgcaggacaacctgcatctggacgcaccgctggtgcgccagatcggctgcgtcattggcacccacaccggccccggcgcattcggcatcgcgttctttgataaagagctggcgctggaataaaacctattagcaaaaacaagtcggacagcccgcgggctgcccgactttatttttacccgtgaaaaagtagtttcgaaacgcccgcaggcgtttcggaactacaaataaaatattctttccgctgattatggccagagcaaagcggagaccattccaaatcgtcccgccttgcccttacagcaccgcgtccgagatcagcttgcccagcagcagaaccagcaccaccagcatcatggggcggatgaagcgggcaccctttttcagcgcgaagtgcgagcccagcaggttgcccagaatattgctgactgcacaggggatgccgatgtggaacaccaccagaccgttcatcaggtaggtgaacaggctggcgtagttgctggccagattgagcaccttgccgttgccgttggcagtgcgcaggtcaaagcccatcagggtggtaaaggcaatgatggcaaaggtaccggtgcccgggcccataacgccgtcgtacaggccgatgccaaagccgatggccagtgccagcaaaatctttttcaggtccagcgtgccgtcgtcccggttctcgtccggcaggttgcgctgccacagaatgatgaccgccgccaccggcaggatgatgaacatcatggtgcgcagcatctcatcgctgagcagcagcacgatgtgcgcgcccagcgcactgcccgcaaagctgccgatggctgcaagaacacccaccttcacgttcatggcaccacttttgaaaaagcttgccgtggcaaaggtagtgccgcaggcggcgctgaacttgttggtggcataggtgtagtggggcggcagcccggcaaacagataggccggcaggctgatcagcccgccgccgccggctgccgaatccacaaagcctgcaaagccggtcatcagcatgagaaacgccatcatccacggcgagatcgtgatacccattgttataattcctcttatctttccaagtcgtttgttctttttcaggggacgcgcgcctcagaccatataaaacctcccctcgcagggcaatacacagcccgggatacccgcacacagcagggcatctccgggcatttttgcaattttttgacttgatattacagattgtttttaaagaagcggtaagcgttgcgccagtagatggcctccacctcgtcctcggtaaagccctcgcggcgcagtgcctcggccagcagcggcatatctgccgccgtttccagctcgtgctgaccgccaatgccgtcaaaatcgctgccaaggctgatgacctcaatgccgcccacctgcttgaagtgtgccgcgtgctttgccagccgctccaccgtgctgcggcagagcttcgggtgtgccgagtctgcgtccacaaaggaagcgcagtagttcagacccgcaatgccgcccttttctgccagtgcgtggatcatctcatcggtcaggttgcggttgtggggcgacagggcacggcagttggagtgacttgccgcaaaggggcgggtgctgtggtttgcgatgtcccagaagcccttatcggaaaggtggctcacatctgcggtgatgtgcagcttttccatctcttccaaaaaggcaaagccttgctcggtcagaccggtctcagtgttggccaccagcggcccgccggggtttgcgttgggggctgccagctcgttggggtagttccatgtcagggtcatcatgcgcacgcccagttcctgcagccgccgcagcacgcccagactgcccttgcagcagccgccctcttccaccgtcagcatggcgctgaacttgccctcggcgcggttgcgctcaaggtcggcggcggtgtacaccggggcgatcttttccgggtaagctgccatgagccgcttgaagatgtcgatctcctccagcacgcttaccagcgggtcggccccgggagcggggtcggccagatccacataggccgcaaagcattgcagcagataatccccctgccgcaatttttcaaggtcgatatgcagatcgttgtgcaaaaagcttttgggtgcgcccgccttttcggcgcggcgcagttcgtacagggtatcgcaatgcagatcccaaaccttcatgatggatacactcctttatgcttcttctcccagcagctgcagcagctgttcgggattcatggacaaaatcgcgccgtctgccccaccggtaacggtgtcggccagcgactgcttggcctgctgcagctccacgatcttttcctcaatggtgtcctgcgcgatcagccggtacacctgcaccgggttgcgctgaccgatgcggtaggcgcggtcggtggcctgattctgcgcggcaaggttccaccacgggtcgtagtggatgacgatatcggcggcggtcaggttgaggcccgtgccgcccgcccgcagcgaaatgagaaagacgtccgcctcgccctgattgaaccggcgcacctgctcggcacgcaccggcttcggggtagagccttgcagggtgaagtggctcacccctgcttcgtccagccgctttgccagcagctccagcatggaggtaaactggctgaacagcagaatgcggtgcccgcccgccaccgcctcggtgacaagctccagacaggcttccagcttggcgctgctgccggtccagttgtccgccacaaggcgcgggtcgcagcagatctcccgcagccgcatcagcacggcaaacacggtcatcttgtcctccggctttgccgcccgcagcttttcccgggcgtccaccaccgctgccaaatacagcttgcgctgctcggtctccagctcaacgcggcgcacattctcggttttgggcggcagctcccgcagcacctcggacttcatgcgccgcaggatgaaggggccggtgaactggttcagccgccgcacggcgttggcatcctcgtcctgcacgatgggcttttcaaaccgggcgcagaaggtcttgtaggggggcagatacccgggcatcaaaaaggagaagatgctccacaattcgcccaagcggttctccaccggggtgccggtcagggcaaagcgcacccggctgtccacccggcacaccgccttgtatttctgggtggtgtggtttttgatggcctgcgcttcgtccagtatgcaggcgtaaaagctttgtccggcatacagtttttcgtcccggcgcagcagatcgtagctggtgatgacgagatccgcctgtgcccacccatcgaccagcgcggcgcggtgggcggcatcgccgtccatggcaacactttgcagctgcggggtgaacttctggcattcctcctgccagttcagcaccagcgacgccgggcagacgataaggctgggcaactgctgcccgccctccttcatggccagcaggtagctgagcacctgtacggtcttgcccagacccatatcgtccgccagaataccgcccatgccgtagccgtccagcgtgcgcagccagcggtagccgtcccgctggtatttgcgcagggtcttttgcagcgagagcggcggggtatattcgctgtcccgcacggcgtggaagctgcggctgatgcgccggaaagcatcgtcccggtcgaaccgcaggccgttctgccccgaaagcgcccagtccagcataggggcacggtagagcggcagggcggcgtggccgtccttcagctttgcaccggaaagctccagcgtgtcgttcagctcgtccagcccttccagactgtcgtccagccgcagcagactgccgtcccgcaggcggtggtagcgttttttctggtgcagggactgcaaaagctcccgcagttcctccaccgggaacgcgccggtgtccacctccaaatccagcacactgccgtgcaccgatacccctaccgagatcttaggcggggcggcttgtaagttgcggaaggcatcggtctggtacacctcgcccatggccagcagggcgggaatgccctcttccagcagctggaaaagcgcctcctccccggaaatgctgtaatgccccggcttgccggtctcgggttccagataggtttccagcagccgctttgcccggttctcggtgcgggcatcccgcaaaaggtcgggcggcaccggctcgccgggggccacccggtcctctccgtacagaaagaccgggtacgccgtgacggtaagcccccggtcggcatccagataaaactgcaccaccggttccagcgggatctggttcagcagcagccggtcggggtccacgatgttgacccggttgcccagctccggcagcacatagctgcaaaaggcggcggcgtccgcgctggtaaagaacaaactgcgcccgccaaaggtatccagcaccggcagcacccggcggcattcctcccgctgcatccgccagagggtgctttcgcccagcagataggcatagtccagcccctgcaccccgctgagcgccggggtacagctcagctgcacgccgcccttgcggcgctctaccttcaggctgatgaccggcaagccctctttaagggtatagccgcccacaacgccctcggcggcgtaaagttctacaagggcatccagcccctcgccggtcagcggcagaccgcccgccgggcctttctcccagccggagcgcaccgtaccctcggcttcaaacgcctgccgggcgctcacctgacggcgcagcagccgcagcagctgctgtgcatccggggcaaaggcgtcccaccggtgcacaaaggccagcgatttcccgtagctgacgctttcgccccgctcgatcgcatccagaaactgcgggatgctttttaccagatactgccgcctgccgatgccatccgagacccgcagccgcagccagatacggccattgtgcggcgtaagctccggttccagcagagcaaagccggtgcgctgggcggcgttctggggctggggctgcgcatcctcccgctggtagcgcttcagcagcagctgggcctcatagtcggtctccggctcctcgccccgccacttgcggccgaacagcatatccagcccggcgctgtaactgtctttgcggggttcggtgctcaagcctgccacgccccgctgcaccccggggatgctctccggctttttttccggggcaggcgggttcttttccgcgtcctgcagcagcagcgcgccaatgtgcttgcagtaggtgccgtcgccgttctggttataggggcagtcgcaggaggcgctgacaaagctgccgttttcccgcagccagacctgcgtataatagcagtccggcccgctgccctgcaccagcgccgtcaggtgccgcaccccgtcctcgttggtggtgcagctgctttgcaggatacgcttgcggtacttctgcgcccgctcaaagatgcttttgcccagcaatgtgcggatctcctgtgcgtccatatggtctccctcccctgtgctgtcgcggttccggtctattttataagaataccgcgttccaccccgggatgcaagggcagaagggtaaaaaacgtttagaaagcgcggggcgggatgattttgaatggcctccgctacgctctagccattttcagcggaagaattattttgatttacaatttcgaaacgcctgcgggcgtttcgaaattgctttttcacaggaggggtcgtagagggaaacggcatttgcagtgcctgtttcctgcggaaacatccgcactgcggggttgcttcttggctctcaacaggtcaaagaaaaagcacccgcaaacgccttcgggtgccaatgcacagacaggaagggttgcaggtgccttctttgttttaggaaactccgcgcttgcgggtcttgaggtggtacatttcctgatcggctttatcgatcaggtcgtgcacggtggcaatgtccggctcaagacgggcgcagccgatgctgatctcgatctggtagggcttgccggaggcggcgttggcggcatccagctcccgctggatggaggcgatcaaggtgcgcacctccacgctgttgcagccgcaggcgatgcaaaattcatcgccgccgtagcgcgccagcacgccgttgtagttggcgcacacctttttcaaaatgcccgccagcagcaccagcgcagcgtccccctccaggtggccgtattcatcgttgatgtgcttgaagtgatccatgtccatcatgaggaagtgcagcgagcggttggggtgacggcggtagtagggcagttcgctttccagataccgcagcgccacgatgcggttgctgacgccggtcagggtatccaccgtaaacttggtctgcaacaccagcacatatacgcacaccagccccagcgtaatgccgcagcacagcagcccgcgcccgggcagccagccttgcagcaaaaagcctgccgccggcgcaagcgcgagcaacagcagggtcttcagttcctccttgggtgtttcctgcttccagttgctcagcgtccagctgcagcggagaaaggccgccgccagataggcaagccccaccagcttcgccccccagaacagggcgctaccccgcagcccctctgcatccagatagcagaagccgttttcgtcccgcgccgtcagcagcaccagcaaaagcagtgtcaccggtgcggcgctgagcgccagcctgcggccgtcctccatccatgtatgccccagctctgcctccacatacaaaaacaccagctggcagcagcacgccgccagcagataaaacaaaatactgcccccggcgttcagccggtaggtcagggggatgcccagatcctgccacgcgcccagctgcgccagcgcactgccatgatctacgatcgtcagcgccccggcagaccacagcagcgccgtaaacagccgcccgggcaggcttttatcccgcattttctgctgcgcccgcagcaagaccgccagcgtgaccagacagaccgcactgacctgagtatgggcaatcgcatccatgccgcaacgctctcctttaccctagggcggctttgcgccgtcccggccctttttcgctcttccaacgttcctttttctcacagacccattgtaccaaatccgtaacaaatatgcaacacaaaccgaaaaattcatacaacaaaaaaagacaccggaacgtctttcggcgttccggtgtctcttggaatcatatcactttgcctgcggatgggcggcgtcgttgcgcagggcgctttcgcggatcttttccagcgtctgctcgctgaggatgtgctctgccttgcaggcgtcctcggcggcggtctgctcgtccacgcccagctgcacaaagaagtgggtcagcagctggtggcggctgtaaatgcgctgagcgatctccagcccgggctccagcagggtcaggttgccttcgccgtccaccgcgatatagccgttctcccgcagctttttcatggcgatgctcacgctggctttggtaaagcccagctcattgacaacgtcaatggagcgcactttgcccatacgctggctcagcatcaggatcgtttcaagataatcttctgcggattggtggatctgcatggtttgtccggcctcctgcctcattccctctgggggatttttccgacaggggatgtgtaccctctgtcgtatgttaaaggatatcacacttttgcggttgatgcaagtaattcgcagcaagttttgttaaactaaccatatttttctgcacagaactgctgttttgccggttttgtgccgcgcctgttttgtgcaaagggtgcaatttagagcgcagccagataggccgcagggccttcctcgtacaggtcgccgccgtgggcatccagcacaacggtcaggggcatatcctgcacggtcaggcggcgcaccgcctcacagcccaagtccggccatgcgatcacttccagcgtctgcacgctttttgccatcagcgcaccggcaccgcccaacgcagccagatacaccgcgccgttgcgcaccacagctgccttgacggcggcatcccgcttgcccttgccgatcatgatcttgttgccaagatccagcagccgggggctcatagcgtccatgcgcccgcttgtggtaggccctgccgagccgatgacctcgcccgggcgctccggggtgggacctacataatagatggcgctaccttccagatcaaaaggcagggtctcgcccttgtccagtgcttccatcatccgcttgtgtgcctgatcccgggcggtgtacaccacgccggaaagcagcacggtatcccccgctttcagcggggcaagctcctgcgcggtgcagggggtagtcagtctgtattccatcgttctcccctccttacagctccgcgctggcgcggcgggtcacatgacaggaaacgttcacagccaccggcagacccgccacatgggtgggcatctgctcaatggcaaggccaagacaggtggtctttccgccaaagccctgcgggccgatgcccagtgcattgatggcggcaagcagctcctgctccagttgggcgtagtaggggtcggggttggggatatccagcgggcgcagcagcgcctttttggcaagatacgccaccttgtcaaagctgccgcccacgccgacgcccagcacgatgggcgggcaggggttggagcccgccagctttacggtatccaccacgaactttttaaagccctccacgccgtcggcgggtttaagcatctggatgcggctcatgttctcgctgccaaagcccttgggtgctaccgtgatgcggcagccctcgccgtccaccagatgcaccgtgatggccgccggggtgttatcgccggtgttgccccggcgcagcgggtcggccacgatgctcttgcgcaggtagccatcggtgtagccccggcgcacgccctcgtggatggcggcttcaaagctgccgtcaatgtgcacatcggtgcccagctccacgaacacgcaggccatgccagtgtcctgacagatgggcaggtctttctcctttgcggcaccaaggtttgaccacagcaggtctaatgtgttctttgccagcggccacggctcttcttcccgcgccttttccagcgctgcctgcacgtcctgcggcagctgggtgttggctttaatgcagagccgcgccaccgtatccgtaatactctgtgcggagatcgttctcatgcctgtatcctccgcttacagtcgtgccacgccggtctcgcgggcagcctttgccacggcatttgccacagcctcggccacgcgggggtcgaacgcaccggggatgatgttctcctcgctgcggtcggcatcggtgatgaggtctgcaatggcgtaggcagcagccagcttcatctcattgttgatatcccgggcgcggacgctgagcgcgcccttgaacaggcccgggaagcacaacacgttgttgacctgattggggaagtcgctgcggccggtagccatcacccgcacgccgcccgccttggcttcgtccggcatgatctccggggtggggtttgccatggcaaagacgatggcgtccttgttcatggtcttgcacagctcggtggtcagaatgccggggcgggacacaccgatgaacacatctgcgccctccagcgcttccttcaggccgcccttgatctggcgggggttggtcacctcacccagccagttcttgtgggcttcggcgctgttgcagcccttgtacagggtgccgaactgatccaccgccacgatgtccttggcaccggcggtcatgagcatcttgatgatggcggtaccggctgcgccggggccgttcaggacgatgtgcacgtcctccatcttcttattcaccacgcgcagggcgttgatgagggcagcggtgaccacgatggcggtaccgtgctggtcgtcgtggaacacgggaatgtccagctcccgctccaaggtctcctcgatctcgaagcactcggggctcttgatatcctccagattgatgccgccaaaggtgggcgcgatggccttgcaggctgcaataacgctggcagcgtcgtgggcgtcgatgcagatggggaaggcgtccacgccgccaaactccttgaacagcacggccttgccctccatgaccggcagaccggcctccgggccgatatcgcccagacccagcacggcggtaccgttggagacaacggctaccatgttgcccttgaaggtgtacttatacacatcctcggggttttccttgatcttgcggcagggctctgccacaccgggggtgtaggcggtggacaggtcgtcacgggtggcaacctccaccttgctcacgatgcccacctttcccttgtgggtctcgtgcatttccagagctgctttattgtaatccatggttttatcctccaatttcagcaaaaggctttcccccgcagggaaaggctcatacagttttattgtaacagaaccgccggggtatttccaccggttttgcagcatttcccgcctcaaagcgggcaaaagtgatacctgtgccgggcgatatttgtggaattttcgccaaaatcttttcttttcgcatttttccgttataataggatggtatgatatttgcattctccgtgaaaacggtctgctatttttaggaggtatctcttttgaaacgcattaccaagatcctgttgtgtgtgctgtgcgcggtggctgctgtgctgtgcgtagctgcggcctgctttatgctgctcaaaaagcagagcggcaccacggcaaactctgccgcatccggcgcaagcgtgtccacctacggcaaggtgtcggatttcgactacgccagcttcgattattctgaggggctggacgataacggccactggaccggcatccgcgcactggactatgtgacgctgccggaggatgtatccgcgctgccgctttccaaggctgatctcgagcctaccgagacagagatccagacccagatcgacactttgctgaatcagtacgccaccacccagaacatcaccgaccgggcagcccagagcggcgacaccgtaaacatcgactattccggcgcggtggatggcgtagcctttaccggcggcactgccaccggctacgacctgacgctgggcagccacacctttattgacggcttcgaggatcagatcatcggccacaatatcggtgacacctttgatgtgactgttaccttcccggaaggctacggcgactccaccgacgccgagggcaacaccatcaccctcagcggcaaggaggctgtgttcagcgtgaccctgaacgccatcacccagagcgttgtccccaccctgaccgatgagtgggtggaggccaattttgccgccagcgacgatctgcacaccgcagacgccctgcgccagtactttgacagcgccctgtacgccaacaatctggacaacgccgcgatggactatctgctcacgaactccacctttaaagaagtccccacccagatcaccagctactacatccgtatgttcctgaactaccactctcagctggctacccagtacggcatggagctggacgcctacgcacaggccaagggctacgccgatgccgacgcgatgctggcggattccgatgcttactttgagcatctggccaagcaggatctggtctttcaggccattgcggagcagctggacatcacccccacacaggagcagatcgacagcgccaacagctcctacgccgacacctacggcgcacagcgcagtatgctgaatgctttgcagctggcggtgctggacaaggtggaggaaagcgccgtgctttcctgacagtgcgtcgaaaaacgattttaaatggcttccgctacgctctagccatattcagcggaaaaattatttttaatagagcaatgccggagcgtctgcggacgctccggcattgcattttcacgggagggggcgtagaggaaaacggcagctgccgcgccgctttctgcgaaagcgcggcgcggcgggcgtgcccgctcccccggggggagctgtcgcgcagcgactgaggggctataaatggagaagcgaaaaaagcgttaaagcgatagcgccgactggcgcagcgctagcttttttgtgcttcgacttcttctttaggattgtcaagggcgagcagcccttggcccgttgcggggtgggtggagtccagaggtagggaggggggagtcggaacacccctccctgcctctggcccagcggagcgtctttgcacgctgaaagcaagcagaagctttcccccagcggcgttgcagatgaattttccgctgcattttctccttacaaagcaaaaggccgctgcacggtgaggtgcagcggccttggttttccacgtttttacttggcggtgttgataaagctgcggttatcccacaggtacttgatgccggagatggcggtcacagcggccaccatccagcacagggcgatggagaccaccaccacgatggaaacgctgtccaccgtgccgcggtagctcagggcagtgccgaagaagtagaagatgatgctcagcatctgcagcacggtcttgaccttgccccacatattggcggcgatgaccttgccgtccttggcgccggcagccaccatgcgcagaccggacaccgcaaattcgcgggccagaatgatgcacagaaccacggggctgcacacgccgtcccgcagcatgtagatgaaggccacggtggtcagcagcttatcggccagcgggtcggcaaacttgccgaaatcggtgaccatgtgccacttgcgtgccagatggccgtccagataatcggtaaagctggcagcagcgaacacgatgccggccagcaggtagaaggtggcgttaaaattgccgtccacgatgctgtccagactggtcagggacacaaagatcatgaacaccggcaccagaatgatgcgggtcagggtaagtttattgggcagattcataggttttatcctccaattcgttattttacgaccgtaccatacagatcgtaaaggtcgctatcctctaccagcacatcatagaactggccggggtacagcggttcctcgctggaaacgcagacgcagccgtccacttccggcgcatcgccggtggtgcggcagaggtacagaccgttttcctcgtcgatgccgtcacacagaacgtgtacggtctgacccaccttttcggcctgcttctgcgccatgatgccggtctggatctgcatcaccagctcggcgcgcttgtccttgacttcctgctcgatctgaccgtccatcttggctgccacagtgttctcctcggcggagtaggcaaagcagcccagacggtcgaactgcacctccttgacgaagttgcacagatcctcgaactgctcctcggtctcgccggggaagcccgcgatcagggtggtgcgcagggtgatgccggggatctcgcggcgcagcttgccgatgacctccagcagctccgcacgggtggagcggcggttcatgttcttgaggatggtatcgttgcagtgctggatgggcaggtcgaggtagggcaccaccttctcgttgcgcttcatggcggcgatgaattcatcggtgatgcgctccgggtaggcgtacatgatgcggatccattccagccccggcaccttgttcagcttgtccagcagctcacagatgctgccgggtttgccccagtcctcgccgtaggcggtggggtcctgcgccacaacaataagctccttcacgccctcaccggccagccagcgggcttcggcaacgcagtcggccatatcgcggctgtgcagcgggccgcggatgcccgggatggcgcagtagtggcagcggttgttgcagccctcggcgatctttaagtacgcatagtgggcgggcgtgccgatgacgcgcttgccgcccagcgggaagtcctttttggcgccgtagctttccagatgatcctcgccgtggaacagccgctccacgatggtatcaatggccttgttggaggcgcagcctacaacggcgtccacctccgggatctcttcctcgatctggctgcggtagcgctcggcaaggcagccggtaacgatgaccttcaggttcgggttctgctgcttataagcgcaggcttccagaatgttttcaatggcctcggtcttggcgctctcgataaagccgcaggtgttcacaaggatgacatcggcttcggccagatcggccacagtctcgtgcccggcagacagcaggatgtgcaccatcacatccagatccacctgattcttcgggcagccaagggaaatacacgcaattttcataagggatgatactctctttctcttttgagggatgcttttaaaattttacgggagggtcattccccctcctccaccctgcggatggcttccttgatgacggggtaggcaaagccgcggcgctgcagcgccgccaccacaaggtcgcggcggccgatagcaagctttttgcggtagcggctgtccaccagcgcggcggcggcttccagctccgggtcgtcgccgccgtcctccggggcgtagaccgcttccagcgcgcccgctacctcggcgggggcaagccccttctgacgcaggctctgggcggcggcgcggcggcttttgcgggcagccagcaggctgtgtgcccgtgcttcggcgtagcgggcatcgttcacatagtccagctgcaccatctccgccacagcggcggcagcggcctgttcggtatagcggcggcacagccgctcatacagtatattggcagagacctcctgcccggccagcgtttccagcgcgctcgcccgcgccttggcggggtcggcgcacttttccgcatccgggcggggtcggcggcggtagaaggccatttagtcctccaccatgatgtccagctcactctcgctgctgcgggtgggtgccttgaccaccggctcctttgcggcggcggggtcggcgggcttttccgctgcggcaacagcgcggcctgccgggcggcgggtggcgtacagcttatcagcgttggcgcggatctgtccctcgatgtcattggcgatctcggggttgtccttcaaaaactgcttggcgttgtcgcggccctgacccaaacggatatcgccgtagttgaaccatgcaccgctcttctgcacgatgcccagcttgacgcccacgtcaatgagctcgctcattttggagatgccctcgccgaacatgatatcgaactcggcctcacggaacggcggagccaccttgttcttgacgatcttggcgcgggtgtggttgccgatgaactgaccggaggagtccttcaggccctccacacggcggatgtcgatacgcaccgaggcgtagtacttcagggcgcggccgccggtggtcacctccgggttgccgtacataacgcccaccttctcgcgcagctggttgatgaacacgcagaccgtgttggtcttgccgatgacgctggtcagcttgcgcatggcctgactcatcagacgtgcctgcaggcccacatggctgtcgcccatctcgccctcgatctcggcgcggggcaccatggcggctaccgagtctactacaatggcatcaatcgcgccggagcgcaccagcgcttcgcaaatctccatggcctgctcgccggtgtccggctggctgaccagcaggttgttgatgtccacgcccagcgcctcggcataggtggggtccagtgcgtgctcaacgtcgataaaggccacctcgccgcccttcttctgggcttcggcaaggatgtgcagcgccagcgtggtcttaccgctggattccgggccgtacacctcgatgatgcggccgcgcggcacaccgcccacgcccagcgccagatccagccccagactgccagtagagatggcatccacctgcatggaggcgttgtcgcccagcttcatgacggcacccttgccgaactgcttttcgatctgcgccagcgccgtagccagcgcgtccttcttggcttccggctcggtcttttgggtggccggtgcaacgttgttgttctgattttttgccatagcctgctgctccttttatcctttgggcccgcagagggcgggccatccttcgctttccttcttagtataacacaaaatcaaaatattacaacaagaagttgtttgttttttccaatttattttggacggcgggcagtcacgcagcggtcgttgccgccaaagtcctgaatgcagcggatctctgcccagccgttctctgccagcagggcggttacggcctcccgctgctgccagccgatctccaataccagcgccccgtcgggacacagtgcgtttttgtagtgctgcgccagcgcacggtagaacacaaggccgtcctccccggcttccagcgccatggcaggctcctgtgccacctcgggctgcagctgctccatctcggcggcggtcaggtagggcgggttcgagacgatgagctccagctgcccctccggcagcgtttcccagtaggtgaacaggtctgcctgcaccggctgcaccgcgtaggcaggctttttgcttgcccgcagcgcgttcagcgccgggccccagtcaaaagtaggcgcatcctcctgctcgagggcagagggttccagcacattctcggtctgtctgccctgcccggtcagggcgcagcgggcattcttttccagatagacaaaggcctcagggcttttttccacgcaggtcacctgcgcggcggggcaaaagcgcttgacccccagccccagacagcctgttccggcgcagaggtccagcacccggggcgctgcgatgcccgcaagggtctcagcggcagcctgtgccaccacctcggtgtctgcccgggggcagagcaccccggggcctaccgccagctcaaagtccaaaaagctccagctgccgcagaggtattgcagcggctcccgcgcggcgcggcgggtgcagagcacttccagcgccgccgcctgctctgcggtcagcggacggtcggaaaggcgcacgtcccgcccggtcgccagccggaacagctcccgcgcgtcaaagtctgcgtccgggcagcctgcggcggtcagccgctgctccacctcccgcaccgctgcgcgggggagcattgcttcgcttaccatttgccctcctccgggttttcaggcagcacgggggtgatggcggcaatggccacctcgatcatgctgtcgtccggctcaaagacggtgaggtgctgcacccagatgcccggctgccggatgatgcgggtggctatgttatccgaccggccgcaccacttgagcagctcgtagctgatgcccatgaccagcggcagcagcagcagcttgcacaccacccgcagaccgatgctgccccacggcagcacactgtacagaaacacgctgacgatgaccaccagaatgagaaagctggtgccgcagcggggatggaagcgggtgtacttgcgcacattctccacggtcagcgggtcacccgcctcgtaacaggcaatggtcttatgctctgcgccgtggtactcgaacacacgatgaatctccttcattttggagatgcccaccatataggtcaggaagatggccaccttcagcacggcctccagcaccactttgccccagcgccccagcggcagcagacggttcaccccgcccacaaggaaggtgggcagcacggtgaacagcaaaatcgccagcagaccgcccagcaccgccgccacggtcatcagcgcattctcggctttttcgcccagatgctcccccacccatttttcaaaggcagtctcctcctcggcggggtcgtagtcgtcccccatgctcacctgtgccgagtacatcatgtagcggtagcccacgatcatgctctcgatcatggcaatggcgccgcgcaccagcgggatcttcgtccataccccatgggtgggagtggggtcgagtttggtctcgatggtgccgtccggcttgcgcacggcgcagcacatctgtttggggccgcgcatcatgatgccttccatcagtgcctgcccgcctacgctggtcttaaagcgttcctttttaggttgattcattggtttctcccgatatccgttcctgccgcttgcggcaaagggcggtcttttttttattttatccggggctatgcccgggcaaaatttattttagcacacaaatgtgacaaaatctgtgttttgggcgtttctcacgccttatggtacagcggcagacccagcgtgaccaccgtgccacgcccgagggtgctcttgatatccagcgtgccgtccagcgcggtcatgatggaatccaccagcgccagaccgatgccactaccgcgcaccgagttgctgcccttgtagaacttggtctttacgttttccagatcctccggcgggatgccgcgcccctgatcgatgatctccacaaaggccttgtactcccctgcccacagtttgaccgtgatgcgcccgccgggggcggagtacttgatggcgttatccagaatattgatgaacacctgccgcagacggtccgggtcggcgtagacagggatcatctcctccggctcggtgtagtggagcagcagcccctcctgccggatgcgcgcctcgcagaagagcaccgcatcggtcaactctgccaccaagtccagcggacggcactccatgcggatgcgtccgttctgcaggcggctgaaatccagcagctcctccaccatattgttcagccgcccggtctcgttgttgatgatctccagtcccttgcggtagttctcgtcggtggggtcgttcagggtcatcagggtctccacccagccccggatggaggtaagcggggtgcgcagctcgtgggacaccgagctgatgaactcgttcttcatcttctcggtctcttccagtccctcggccatctgattgatggtaccgcgcagccggtccacctcgtcgtgagggtcgccggtcaggggcagacgcacgtccagctcgccccgggcgatgccggcagcggtgcgctccacctgccccagcggcaccacgataccccgcacaaagtacagcccggacatgatcgtaaacagcaagatcgccaccgcaaggaacacactgatgatgatggcgtttttgacctgccgctccaccagcgccagactggtgaccagccgcagcgcggccacgtcctcggcgtcgtagggcaccagcgagcaggccgccatgactacctcaccagactgggtgcggtacaccgccacgcccagaccgtccgggccgttgagcgcctgttcaaagtccttactgctgacgatgccctccgcgtccgtaccgctggaggaggcaatgacgccgccgtaactgtccagcagcatgaactcgtatttatccttatcggcaaactgctccaccatgcgccgcagcgccagactgcggctggcagcggcgctctgggcggtatcgccggtatacattttcagctgaccggtcaccgaggagaaccgccggtacatgatctgctgcacactgccgtagtagctgcgggtatagctgtacaaaaacatcgcctcggccagcagcaccaccagtacggtgatgagcaggttgccccgcagccagcggcgggtgataccgcttcgcataacagtgtcctcctttcggtgagtatcgataataaaaagatatttttttgtgattcaggaaagtccgtaggactttcctgaatcacatttttattcttcccaccggtagccgtagccccacacggtcatgatgtgggtggggtggctgggctcgtcctccaccttcatgcgcaggcggcggatgttcacatccacgatctttacatcgccgaagtagttctcgccccagacccccttcaggatcttttcgcgcaccagcgccgtgcccgggttgcggaagaacagctccatgatctggaactccacctgcgtcagctcaatgggctgaccggctttcagcagcacgcggcggttctcgtccagcacgaagtcgccgctggtcaacgtgcccagtggggtgttcccgttgctgtcctcctccttgttgcgggtcacccggcggcacagcgcctccacacgcgccagcagctcgctgacgctgaagggcttggtcatgtaatcgtctgcgccgatggacaacccgcggatcttatcctgctcctgccccttggcgctgaggatgatgatgccgatctgctggtcggtgcggcggatggtctcacacagcgagaacccgttcatgcccggcagcatcacgtccagaattgcggcatcacagccgggtttctgtgccagcagcggcagagcggcttcggcgctttcggcctccaccacctccatccccgcatggcgcaggttcagggcaatcatatcgcggatattggcttcatcttctacaacaagcactcgtaccatgcagcatcctccattccttaattcagcagatacaacgccttggaaaggcggtagttcgtgtcagaaagcaaaacgcccgggcccattttggcctgcacctgacgggacgctaccacgcccagccgggtccagccggtggagttggccgaggtgcttgccagccgtaccgtcagcaccaactgatcctcgtccaccgtgcgcagctccactgcgccgtcaaattcctcgctgtcggtcagcttcaggttgccctcccactcggcgggcagttcgatataacagttggtctcctcgtccagcaggccaaagcttttttccggttggctgctggtgtagtccatccagacgataaagtccatgcggcggctctggctcaggttcagcagacccgcctcgtccggctgggtggggatctccacgatgccgtccccgtccaggtcccggctgaccagcgtgggcacgttgcgcaaagaggcgttatacagccgctggctgctgatccgtgtggcgggcaccatctgctggctagtctcgtcgtagcacagcagcaccgaggccagattgttgccggaaatgccagtccagccgtccagcaccagatagtgccgcccgtccgcgcccgcgcccgccgccaccgaggcgcagccggaaaatttatctgcggaaaggccgttgaccgccacctgccggaagctgccctcgcggtctgcggtcagaagttcgatctgcacactgccatcctcctgcgtggacatcaggatcagatcctgactactgccgccggtgatattttccaccagatactgctcgtactgctgctccagaatggtggacagggtgcccttctgataggagtacaccgccagatagtggtcattctgggcagcggtatagcccaccaccagctggcagctgtccgtatcctgcaattgggcaagactgacgttttccaccgtttcggcaaggccctccacgctctggcgcacctgccagcttccggcgtcgtctcgctgcaaaatggctacgcagacgttggcggtctgggcggtggtatacagcaccgccgcatcctgctgaccgtcaccgtccaagtcctgcagcacaaagggagaaagcagctcgccctgaataggatatttcagctgggcactctcccccagccagtcgttcagggccgtttgcagcgcgccgtaatcgccggaaagcttcggggcacgcagcagttcctccacctgtgccttttcgttggccggcagcacggtctggcagctgcacagcacaaagcacagcagcgtgcacagcaccagccgcagcctgtgggtcctgttcataccggtcaacctccttccgggcataaaatgctattttcagtataccacactttgcgggcacaaaaaaggggggtgggacatatccggcaagcttgcgcgtgggacgattttgaatgcgcgccgcgactgagggggtaaaccacaaaaaaagaaaccactgcacaaaagctgtgcaatggtttctcttgttactgtatcaaacagtcagagcaggttcagacgagctccagaactgccatctcagctgcatcgccgcggcgagcgccgatcttgatgatgcgggtgtagccgccgttgcggtcagcgtacttggggctgatctcgtcaaacagcttctttgcaacatcttccttggtgatgtaggcgtagacctgacgcttggtgtgcaggtcgctggccttgccaaggctgatcatcttctcggccatggaacgaacgtccttagcgcgagtgacagtggtctcaatcttgccattctctaacaggtaggtaaccatagcgcgcatcatagcgttgcggctgtcgctggttctaccgagctttctggtaccgggcatcccgtttcactccttaaattattttagttattcgtcatccgtgttcagcttgaagccgagggagtccagcttagccatgacttcctccaagctcttgcgaccgaggttacggaccttcatcatctcgtcctcgctcttgctgaccagatcttccaccgtgttgatccctgcgcgcttcaggcagttgaaggaacgcacgctcagatccagctcttcgatggtcatctccagagccttctccttgtcgtcgttggtcttctctaccatgatctcagcgccggcggcctcgtccgacaggttgacgaacaggttcaggtgctcggtcagcacacgggcagccagagaaacggcttcctgtgcgttgatcgtgccatccgtccaaacctcaatggtcagcttgtcgtaatcaatggcctgtccaacacgggtgctctcgacgttataattcaccttgagcacaggggtgtaaatgctgtcaacgggaagggtgttgatatcgttcttctcgatgatagcctgtttgttgcgctctgcgggcacatagccgcgacccttgtcgaaagtcagctccataacgagcttggcaccctcgcccagagttgcaatgtgccactcagggttcagaatttcgatgtcgtcgccctgcttgatgttgtcagcagtgacctcacagggaccaactgcctcaacacgcactgtcttcggaccatcggtgtacagctttgcagcgatacccttcaggttcaggacaatttcggtaacgtcttccttgacgccctcaatggtggagaactcgtggaccacaccgtcaatcttgacgctggtcacggcgacaccgggcagagaggaaagaagcacacgacgcaggctattgcccagtgtgatgccaaagccacgctccagaggttctgccacgaatttgccgtagcggccgtccggggacaggcttgccgtttcgatcttgggacgttcaatctccatcatatctatgccctccttgtcaaaccggtgtttccaccggcccattattgaattctttcaaaaaaagaatgcgaaagcgtaccatccaaaaggaaggcactgccttcttaatggattacttggagtacagctcgacgatgaggtgctctgcgacttcgtagtcgatatcgctgcgctcgggcagcttagcgacaacgcccttcagagaaccggtctcgcggttcagccatgcgggcagagccacgacgggagcctcggcaccggtcagctttgcaaactttgcagagctgcggctggactcgcgcacttcgatcacatcgccggccttcacctggtaagaggggatgttgaccttcttgccgttgacggtgaagtgagcgtgagacaccagctgacgagcatcgcggcgggtctgagcaaagcccagacggaacacgacgttgtccagacggcactccatgatctggagcaggttctcaccggtcttgccggggcgagcctctgccttcaggtaagcgttgtggaactgcttctccagaacgccgtaaatgaacttgaccttctgcttctccttcagctgagatgcgtactcagactgcttcttgcggacgttgccgttggagttgcgggtggtattcttctttgcatagcccatgaccgcaggagaaatgcccagggccttgcaacgctttgcgataggctgcgtattctttgccataattcaatttcctccttcgatcagacacgacggcgcttcgggggacggcagccgttgtgggggatgggagtcacgtccttgatcagggtgacttccagaccggtagcctgcagcgcacggatagcggactcgcggccagcgccggggcccttgacgtaaacttcaacagtcttcatgccgtgctcgatcgcagtcttagctgcggtctcggcagcggactgagctgcgaacggggtgctcttgcggctgccacggaagttcagggagccggaggagcaccaggacactgcattaccctgcaggtcggtgatagtaacgacagtattgttgaaggtagactggatgtgagcctgaccagcagcaatgttcttgcgctctttccgcttcatgcggacatttgcgcccttcttggcgttatttgcacttgccatttctcaaatcctccttacttcttcttgtttgcgacagtgcgcttgggacccttgcaggtacgagcattggtcttggtgcgctggccgcggcagggcagattcttgcgatggcgggtgccacggaaggactggatctcgaccagacgcttgatgtccagagccacattgcggcgcaggtcgccttcaacgaggatgtttgcctgatcgatgtagtcacggatcttagcctcttcgtccagagtcagatccttgacgcgggtatcggggttgatgccagttgcttccaggatcttgttagcagtggtctggccgataccataaacgtaggtgagacccacctgaacgcgcttctcgcggggcaggtcaacgccggcaatacgtgccatagtagtttcctccaaaaatcatcccatgtcagtgtcggggtctgcgccgggactctacgcacttgacccccaggcgcccgaattagccctggcgctgcttgtgcttggggttctggcagatgaccatcacgcggcctttgcggcggatgaccttgcacttttcgcagatgggtttcacggaaggcttgaccttcatgatgttgaacctccttttggttgatgccctgacgcttatttggagcgccaggtgatgcggcccttagaaagatcatagggcgacatttccacggttaccttgtccccgggcaggatacggatgaaattggtccgcagcttgccggagatgtgcgctaagaggatgtgaccgctgggagtgagcttcccggtgttcttatcctcgctcaacatttccaccttaaagatggcgttgggcatggcttcacgcacaatgccttcgatctcgatgacgtcttctttagacaagctatttgcctcctcattggatctgctcagtttgtcataattgagcaccggtgctcccgctccaaaaacagaaagcactgcattcttccgtgcctgcgcccgtttttgtgcagtttgccgcttctcttttcaagagctttcacgccgattcccagacggacaggtggcgatgagcgccacatacttcatctcctgcggcacaaaatccgcaaaacgggcagactgagcctgtccgtcgaggaagtatctggcttccacagccatttatagattatacaccttttgttgtcaatttgcaagaggttttttccgtatttccgataaaaaattattctgtataaaagctcttttccgtcccgtcctcctttcgcgtttctccaccgtgaaggtgaaactttttcacgaaaacttgtcacaattgcacaaattgcaggggtgaaaagagaaagaagccgctgcacatcgtccgtgcagcggctcctttacaaaggttgcttacttcaggctgaaggtggccgggtcaaaatccgggtcatcccagctgcgggtcatgatctcggtgcggtccttcaggatggcgatggagtgctcaaagtgagcagccagcccgccgtccttggtcttgacagtccagccgtctctgagctgcttgatcttgtagtctccctgacagatcatcggctcaatggcaatggtcatgccgggcacaagccggggcccgcggccctgatggccgtagttgggcacctcggggtcctcgtgcagctccttgccggtgccgtgacccacaaagtcacgcaccacagagaagcccgcgtcctcgcagtagctctgcacggcgtagccgatatcaccgatgcggttgcccgccacggcctgctcgatacccttgtacagagaagccttggtcacctccagcaggcgctgggcttccaagtccaccttgcccaccgcgtaggtgcaggcattgtcgccgttgaagccgtccaccttggcaccagtatcgatgctcacgatgtcacccgggcggatgacgatatcatgagaggggatgccgtggatgacggtatcgttcaggctgatgcaggctgtgctgggaaaaccgtacagacccttgaagttggggatgccgccgtgcttcacgatgaagtcgtagatcagcttgtccagctcccaagtggtcatgcctgcttcgatgtgctctccgccgtacttcagggcagctgcgctcagggcgtttgcccggcgcataccgtccagctcttttgcatttttgatctgaatcacgcttatgcctccaaagccttcatgacttcagccgtagtctcctcgatggaggggcagaacttgatctctgccagcttgccgcgggtgcggtagaactccaccagcggctcggtctgctcatggtaggctttcagacgatccagcacggttgcgggctggtcgtccttgcggatgacagtcttgccgccgcacaggtcgcagacgccctccaccttgctcttcttgttcaggatgtggtagcttgcgccgcacttctcgcagacgcggcggccgctcatacgctccacgatcacgctgtcctcaacctgcagttccagcaccttgtcgatgcggatgcccatggtctcgatggcctctgcctgcgcaatggtgcggggcacgccgtccagaatgaagccgttggcgcagtcagcctgtgccagacgctccttcaggatgccgatgatgacttcatcgggcaccagtgcaccggcgtccataaagctcttagccttcagacccatctcggtgccctccttgacagcagcacgcaggatgttaccagtgctgatggaagggatgttcagctttgcgcagatgatctcggcctgcgtgcctttgcctgcgccgggtgcgcccaacaggatcagattcataggatcgcttcctttcttatatgccacatgatagaaacatacgtacaaaagcaaaaaagcactgaaaagtatgagcgtactctcctttccagtgctttcttacatctttattgcttcagatcagccaaggaaacccttgtggttgcgcatggtcataaagctatcgaggctgcgggtggtatccagtgccacaccaaccacgatcagcaggctggtaccgcccagctgaatgctcataccggtcaggttgcccagaatgatcggcagtacagccaccgcagccaggaagatggcaccgatgagggtgatcttgttcagggtgcgggtgatgaaatcgctggtcggcttgccgggacggaagccggggatcgagccattgttacggcgcagattgttggcgatctcaacagggttgtactggatggccacatagaagtagttgaatgccaaaatcagcagcaggtagatcacaacgtacagccaggaggtgtagttgaaggtatggaagaacgcataccagaccgggtgagcggtctgatcgatctgcaaaaagctgccgatggtgcccgggatggacaccagagccgaagcgaagatgatgggcatgacgccgctcatgttcagcttcaggggcagatagctgttctggccgcccatctgcttccgacccaccacacgcttggcgtactggatggtgatgcggcgctctgcgttggtcatgaccaccacaaagaccacagcgaccagtgccaggatcaccagaacgggcagcaggatgtagaactgaggctcgccggccgctgcgcgggtcagcagacccgtgacagaggtgtacagcgaggaccagttggaaacgatggaggcaaagatcagaagggaaacaccgttgccgatacccttgtcatcgatctgctcgcccgcccaagtgatcagctgagcacctgcaacgaaggtggcgatgatgaccacagcggcgaacacgccggctgcgccggaaacatacttcagtgcgcccatattgcggatcacgaagtagtagccaatgctcatgatcagcgcgaccacggcaccggcgtaccggttgatctgctgcagcttctgctggccgtccgcttcctttgccagattttccagcgcaggaatggccacagtcagcagctgcacaataatagaggcgttgatatagggtgtcacacctaacgcgaagagcgtgcatcttgccagtgcgccgccgctcatcatattgaggtacgagagcatatcgccgtttgcaaacatctgcgtcagtgcagagccggaaacgaacggcacggggatggcacagccaagacggtaaaccacgaggatcgccagcgtgaacagaagacgatttttaagctcggggatcttccatgcgttacggaatgtctggaacaccttacatcacctcagcctttccgcctgccttctcgattttctctttggcagaagcggaataggctgcggccttcacggtcagagccttggtcagctcgccgttgcccagaaccttaacgccgtccagagtcttcttgaccagacccttagccttcagagcctcggtatcgacgacatcgccggcattgaaagcagcctccagatcagccacattaacgatggcgtactgggtagcaaagatgttgttaaagccaaccttaggcaggcggcgtgccagaggcatctgaccgccctcgaaaccagcgtgcttcacgccggaacgggccttctggcccttgctgccgaagccggcagtcttgccattgccggagccaatgccgcggcccttgcgggtcacaggcttgttggcgcccttgctggcgtgcaattcatgaagcttcattgtgcgtataccccctgctattaggcttcggtgacgctgagcaggaagccgatctttgcgatcttgccctgcgtagcggcgttgtcaggctgaacggtaacgtcgcccggcttcttcaggcccagagcctcagcggtagcgatctgcttagcgccgcggccgatcaggctcttcttcagctcgatcttgagcatcttatctgccatggttagttacctccttaacccagaatttctttcacggtcttgccgcgcttctcagcgacagactcggcgctgaccagaccgcacagacctgcaaaggtagcagcaacaacgttgatggggttgttggaacgcatagacttcgcacgaacgtccttgatgccagcagcctcaatgacggcacgcacggggccgccggcgatcataccggtaccgggtgcagccggcttgagcagaacagcgcctgcgccgtacttgccgacgatctcgtgggggatggtggtgcccttcagggcaaccttgtgcatgttcttcttggcagcggcctcacccttgcggatagcctcgggaacttcaccggacttgccgatgccgtagccgatggtacccttgccgtcgccaacgacaaccagagcagcaaacttcatgatgcggccgcccttgacagtcttggaaacgcggttgatagacacaaccttggtgatcatgccgtcgtcttcacggtttctcatagccataatgtgtttcctcctctcattacagcttcaggccgccctcacgggcgccatcagccagggccttaacacggccatgataaacgtagccaccacggtcgaacacgacctcggtgatgcccttttccagagcctttgctgcaaccttcttgccgatctcagcagcggcctcgacgttgccgccgttgccgttgaagtccttgtccatagtggacgccgacaccagagtaacgccctgctcatcatcgatgatctgagcgtagatgtgcttggcggagcggaaaacatccaggcgaggacgtgctgcggtgccgctgatcttgttgcgaacgcggcgatgacgacgaagacgagcttcgttcttgtcgatctgcttaaccattgtctttcactccttaccttatttcttgcccttaccggccttgccttctttgtgcttgacgacctcgccagcgtagcggatgcccttgcccttgtacggctcaggcggcttcttgccgcggatctctgcagcatactggccgaccttctgcttgtcgataccggtaacagagaagtggttgggatcctgccacacaatggtgcaatcctcggtatcggggatattcacctgatgagagaagcccaggttcatgaccaggttggagccctgcttctggcagcgcataccaacgccaacgatctccagcttcttctcgtagccgttcacaacaccgttcaccatgttggcgatgttggtacgggtcaggccgtgcaggctgcgggccttgggttcgtcattggggcgggtaaccaaaacctcattgccctcgaccttaacggtcatcaggggatgatagttggaattcaggctgcccttggggcccttgacggcgacggtgtgtgctgcctcatcgacagtgacagtaacgccggcaggaatgacgatgggttttcttccaattctcgacattgtcttttacccctttcttaccacacgtaggccaggacttcgccgccgacgtgctcagcacgtgcagccttgtcagtcatgatgcccttggaggtggaaatgattgcgatgcccaggcccttcatgaccttgggcatatcctcgcagttggtgtagatacgcaggccgggcttggacacacggcgcagaccagcgataacgggctcgccgttagcctggtacttcagggtgacaacgatggtgccctgaacagtgtcgttcttgacctgcatacccttgatgtagccctcgtcaaccagaatctggcagatagccttcttcatgttggaagcggggatctctacagaagggtgtttggcagtgctagcgttgcggatgcgagtcagcaggtccgcgataggatcagtaatctgcatttgccactaacctccttagattagctctcatttgttttataatgataccgccccgaaacaagttgtttgccccggggcggatatccgacattttatccagccctctggtaaattaccaggaagccttcttcacgcccgggatctcgcccttgtaggccagctcacggaagcacacacggcacacaccgtacttacgcagcacggagtggggacggccgcagatgcggcagcgggtgtatgcacgggtagagaacttagcaggacgagactgcttcagcttcatagacagtttagccattgtacaaatctcctcccttagttgttctctgcgaagggagcgcccagagccttcagcagctccttgccctcctcatcagtcttggcagtggtgacaaagcagacatccatgccacgaactgcatcgaccttctcgaattcgatctcggggaagatgatctgctccttgatgccgcaggcaaagttgccgcgaccgtcgaagccgttgccgttgatgccgcggaagtcgcgcacacggggcagagccacgttgaagaagcgatccacgaactcgtacatacgctcaccacgcagagtgaccttgcagccgatgggggtgccctgacgcagcttgaagttagcaacgctcttcttggcacggcagacgactgccttctggccagtgatctggcccagatccttcataactgcttccaggatcttctcgttttccttggcttcgccgcaggcaacgttgatgacgaccttgtccagcttggggatctgcataacgctcttgtaaccgaacttggagttcagagcaggagcaatttcattgacatactgttctttcaaacgagccattgttccttactcctttcttacagctcagcgccgcacttcttgcagacgcgaaccatcttgccgtccttttcgacgtggcccacacgcacggccttgccgcacttggggcagacaggcatgaccttggatgcgtacatagcaccctcagccttgacgatgccgccctgctcgccctgacggcgaggcttgacgtgcttggtaaccatgttctggccttcaacgatgaccttgccttcagcggggctgacctgcaggaccttaccagtgtggcccttgtccttgccgctgatgatcatcacgttgtcgccggttttaacatgaagattattcatttttaaaacctccttacagcgattccggagccaggctcaggatcttggtgtagccggcatcacgcagctcgcgagcaacaggtccaaagatacgggtacccttggggttcttgtcggccataacgataacggcggcgttctcatcaaaacggatgtaggaaccgtcgtcgcggcgcacgccatgcttgctgcgcacgatgacagccttgacgacgtcgcccttcttaacggagccgccgggggctgccttcttgacagagcagaccacgacgtcaccaatgtttgcgtatctcttgcgggtgccgcccagcacacggaagcacatcagctccttggcaccggtgttgtcggcaactttgagataagtttgcatctgaaccatatcagatatctcctttcaaactgttcaaagcagcgggcaaagattactttgccttctcaacgatacggaccaggcgccagcgcacatccttgctcagggggcggcactccatgatctcaacacggtcaccgataccgcactcgttctgctcgtcacgagccttgaacttcacggtacgcttcaggatcttcttgtacagggggtgctgcacgctatccttaacggcaaccacgatggtcttatccatcttgtcggacacgacgacgccgacgcgggtctttctcagattacgttcttccatcgtttaacctccttactgcttctcagccagaacggtcatcacgcgggcgatgtccttcttgactgcttcgatgcggccggggttctccagctggttgatggcatgctggaagcgcaggttaaacagctcagccttcagatctgccagcttgctggtcagctctgcggtctgcatttcgcggagttcattagccttcattggtgccatcctccttcacggagtcctcacggacaacaaatttgcacttgatgggcagcttgtgcatagccagacgcagagcctcgcgagcagttgcctcatcgacatctgccagctcgaacatcacgcggccgggcttcacgactgcaacccagtattcgggagagcccttaccggagcccatgcgggtctcagcgggcttttcagtcacgggcttatcggggaagatcttgatccaaaccttgccgccacgcttgatgtaacgagtcatggcaacacgggcagcctcgatctgcttggaggagatccatgccggctccagagcaacaaggccgtactgaccctggcacaccacgttgccgcgggtagccttgccggtcatgcggccgcgctgaacgcggcggtacttaacacgcttaggcagtaacattacttgttgcctccttccttcttaggagcggtctttgcgctcttgaggacctcgcccttgtagatccacaccttaacgccgatgcggccgtaggtggtagcagcctctgcaaagccgtaatcgatgtcggcgcgcagggtctgcaggggaatggtgccctcgtggtagctctcggtgcgggcgatatcagcgccgcccagacggccggagcacattgccttgatgccctttgcgggaacggttgcgcgatcgcgggggctcatggcattgcgcatgcactgcttcatagcacgacggaaggtgacgcggttctccagctgacgagcgatgtcctcagcaaccagctgtgcgttggtggaggggctcttcacctcgatgacattgacgataacagtcttgccatactccttggtcagcttgttctgcagggcgatgcgctcttcgccgcccttgccgatgaccataccgggcttagcgcagtagatgttaacattaacgcgaggagcggaagtggaaggatccacagtgcgctcgatctcgatcttggggacgccagcgtccttcagctgagccttcagctcagtgcggatcttgtgatcctcgacgaggttatcgctgaaatccttcttggaggcaaaccagcggctgtcccagtctttaataacgccgacacgaatgccgtgcggatttactttctggcccattgttttccctccttactctttctctttcagaacaacggtcatgtggctggtgcgcttcaggatgcggtagccgcggccctgtgcacgaggcatcatgcgcttcagcgtcgggccggggcaaacgtagcactcggcgacgtagaggttgttcttgtccatattgaagttgttttccgcattagcggctgcagacttcaccagcttcagaaggggctcacaagctgccttcggggtgtactgcaggattgccagcgcttcgtccaggggcttgttacggatcaggtccataacgatagacaccttacgaggactaatgcgggcataacgaagaattgcccgagcttccatgttgtgttcctccctctattacttagaattaccagtgtggcccttgaaggtacgggtgggaacgaactcacccagcttgtggccaaccatgtcctcagtcacatacacaggcacatgcttgcggccgtcgtggacggcaaaggtgtgaccaacgaattcggggaagatcgtggaggcgcggctccaggtcttgatgacctgcttcttgccggaagcgttcatcgcttcaacgtgcttcataagagcagcctggacgaaaggtccttttttaatgcttctacccattgtcttaaactcctctcttacttacctgcacgcttcacgatcagcttatcggagcgcttatgatgcttgcgagtcttgagacccagagcgggcttgccccagggagtcataggaccggagtgaccaacaggtgcgcggccctcgccaccaccgtggggatggtcgcaggggttcataacggtaccacggctgccgggacgcacgcccatgtggcgcttgcggcctgccttgcccaggttgacgttctcgtggtcgatgttggaaacctgaccgatgactgcggtgcagttcacgggcacgttgcgcatctcaccggagggcagacgaaccagagcgtagccattctccttagccatcagctgagccatgttgccagcggaacgaaccagctgagcgccgcggccgggatacagctcgatgttgtggatgatggtaccgacggggatgttctcgaagggcaggcagttgccgggcttgatatcggcagacttgctgctgacgaccacgtcgcccaccttcaggccatcgggagcaatgatgtagctcttggtgccatcggtgtactcgaccagagcgatgaatgcgctgcggttcggatcgtactcgagagtcttaacggtagcggggacatcggtcttctgacgcttgaagtcgatgacacgatacttggtgcggttgccgccgccctgatggcggacggtgatacgaccggtgttgttgcggccgctgtgcttcttcatgggctccagcaggctgcgctcaggagcgaccttgctcaggacgctgtaatccgtgacggtcatgccgcggcggcccggagtagtggggccatactttttgatagccattgtgctattctcctttgtttatcttatgaattattatcggggtcatatccccatagaggaaccctcggcgggttctatcagaccatgctgttgaagaactcgatctccttggagtccttggtcagggtcacgatagccttcttggatgcagcggtgtaaccagcgtgcataccctgacggcggaagcggccacggacggagacggtgttcaccttagcgaccttgacgccggggaacaggacttcaactgcctgagcgatctcgaccttggtagcatcggtagcgaccttgaaggtgtacttcttgtcagcgatgccagccatggagttctcggtaatgaccggcttcaggacgatatcatgtgcggttttcattagccaagcacctcctcgagcttcttagctgcgtcgacgctgatgatcagcttgtcggcgttcagcacatcgtaggtgttcacgctgcctgcgaaggtggtcttgacaccggcgatgttgccagtgctcttgacgaactttgcatcgacagtctcgttgaccagcaggttcttcttgccggcgcccacagcgttcagcatagcgaccacagccttggtcttgtactcgtcgcaagcgaacttgtcaacgatgaccatgttgccattggcagccttgtcggacaggacgctcagcagagccagacgcttgaccttgttgttgatgtggtagttgtagctgcggggcttggggcccagagcaacgccgccgtgggtccactgcggagcacggatggagccctgacgagcgtgaccggtgcccttctgacgccaaggcttcttgccgccgccggaaacttccatgcggatcttggtgttctgggtgccctgacgctggttggccaggaagttcaccacagcaatgtggacagccttctcattcggggtgataccgaacacggcgtcggaaagctcgatctcgctaacgtgctgaccgttcatatcgactacattaaactttgccattgtagctttcctccttacgccttgacgctgttggccagggtgatgatggtgcccttggaaccgggaaccgcacccttgacagcgatcagattgttctcggtgtcaaccttgacaacggtcaggttctgcacggtaacgcgcacgcagcccatgtggccgggcaggcgcttgccggggaacacgcgagaggggttggaaatagcgcccatagaacctgcatgacgtgccaccgggccagtgccgtggctctcacgcagacggtgctggccaaagcgcttgataacgccctggtagcccttgcccttggaaacgcctgcaacgtcaaccttgtcgcctgctgcaaagacgtcagccttcaggatgtcgccaacgttcattgcggaaacgtcgtccagacggaactcacgcagggtcttcttgggggcaacgtttgccttcttgaagtgacctgcagctgccttgttgaccttcttggcggaaacctcgccgaagcccagctgaacagcctgatagccatcgctctcgacagtcttcttctgcacgacggtgcaggggcctgcctcgatgacggtgacggggataaccttgccgctctcatcgaacagctgggtcataccgactttcttgccgataatgcctttaaccattttcttttcctcctgtaaaggttattggttggcagcgcacgtcactgccaacatgacccctcgggaaacgagggcatcgaatttgatcgtgtgtggtttacagcttgatctcgatgtccacgccagcggggagctggaggctcatcagagcctcgaccgtcttgttggacggcttcagaatgtcgatcagacgcttatgagtgcggctctcgaactgctcgcggctatccttgtacttgtgggtagcgcgcagaacggtaacgacctcacgatcggtgggcagggggatggggccagacacgcgggcgccggtgcgctttgcggtctccacgatcttctctgctgcggcatcgatcagctgagcatcatagctctgcagacggattctgattttctctttgactgccattgcttacgcctcctgaaaaattgtttttgccctaggcgagccgataaattgctctacacagttccgggtgttcctcgatttggcactataaaaaccggtgaaccgcatggcagttctcccggaaacatattagcaaatcaaatccgaacattggttccacccgtttcgcagaggagtaacttctctgccgagggaacgtattccatcgctgtcagtaattttttcgcccggttctaagatcggacatactccgcggaaataacccatcgcagctatcgccggatgacaacctcccgcatcaacgcatatcgctggcctgcacgacttgtatcgcacaagccttttgcagccgagagatattttatcacatcttcgtctatttggcaagtgttttttgcagaaaattacgatttttcttttttattttctctgttttgtcaatagccgcattttctgtgcaagatgcacaatctcagcgctttttgccggtggaaaactccgccgtgcccctttgcagcatcagtatgggcggaaaaggcggggggtatacctattatataggggataccccttccgtctgctcactgcgttcgcagccaccttccccaaggggacggctttcgtggtggcggcaagctttccgactcaagtgtaaagcttccgggggagctgtcgcgcagcgactgagggggtgtctttcccgtgaaaatggactgccggaacgtccgcagacgctccggcagtccgaaattataaagttttcttccgctgaagatgcgcagagcagcgcggcgcgcagttcaaatcatttcttcttcagctgttcctccaacccttcccgcggggtgatgtagacggtagtgtatacctcgtacagcaccatgccgggctttgcaccatttgctttccagatgttcttcacctcggtggtgtccactgccaccttggcgccggtgcccgccttataggcgctggaatggatgaccgccagctctgccgcttcctgcttggtggtgtccgggatgtcctcgccccggctcatgaccacaacgtggctaccgggggctttctgtacatggaaccacaggtccttgccccgggcggtgtgcagggtgagcttgtcgttctgggcgttgttgcggcctaccaggatctcaaagccgtcgctggaggtatagcgcagaaagtccgcaggcttctgctttttgtcccgctgcttgtagtatttcaggtagccctgatttttcagctccatgcggatctcgttcagcgcggcttcgccggaggcgctttccacctcgtagagcaccgtttccagataggcgatctctttttcgccctcggccagcaggtccaccagcatccgggcggcggtctgcttctttttgtagttcttaaagaagttctgggcgttctggctggggctgaaccgcagatccagcgggatggtcacctctttgccctcgtcataccagttgggcacggtcaggctcttcatgcccttttgcgccagatagaggttggcggacagcagctcaccgtacaggcgcagcttttcgcttttgccgctggcggcaagctcttcctgccgtgccgcctgcttgcgcagggcgcggtcgtacatattgtgcaccgccttgtgcagctccttgctcttggtgcgcagccgctcagcgcggtccttctcggcgtagtagccctccagcatcgcgttgaaggacggccactcccggatggtgtactgctcgccatactgctgcggacggaagaaggtatactccaccggcttgccgtccggtgcggtgacgctgcagggacagccgccctgcgtgtgcagttccttcagctcgtcgattgctgccatcaggctgcgcttctgggcatcggtcagttcgttggcgggcagatgttccccgtcaaaggcgcgccatgccgcctcgcggcagaccaccggcccaacgccagccaccgttttgttcagagcatccgccaccggcagttcccgctgacaggctgctgccacgatggatgcactgctcaccagcagaaagtccgggcgggcgggcttgggaggcgtggtgtagggcaagcccggcagcagctgccggacgtcgctgtcctcaaaatccactcgcttgagggcgtcgataatttttccgctctgcaccagcacaaggttggagtagcgccccatcagctccgcgcacagggtattgcgcacaaggtcgcccatctcgttggtgcactgaaaatcaaagtagacgatgcggtcgcccggctccatgtgcacatccagcagtctgccgccggtcaggtgcttgcgcatgagcatacagaaggagggcggcgtttcggggttttcaaaggtctcctcggtcagacacacccgtgcagagccgctgcgggcagacagcagcagggcataggtatcggtgcgggtgcgcagggtgatgaccagctcatcccgggtcggttcaaaaatttttgcgatcttggcatcggtcagggtggctttcagctccgctgccgtcagcgccagtgtcgcggcatccagtgccataaatgttacctcgttttatctataaccctctcagtcaacgcctgcgggagagcttttgctctttttcggtttatgctgaaagacctccccctttcgggggaggtggcattgcgcagcaatgacggagagggttttctctttataaataagtatacgggtcgcggttctcggtgctcaccagcacctccagctccggcagggcggtgcgcagagcagccgccacagcggcggtcaccgggaactcggtggcgtaatgccccgccgcaatcagggaaagccccagccgcttggcgtccagtgcatggtggtggttggcttcgccggtcagcagacagtccgcgtcctcggcgatggcttcggcaaacagactgccgcccgcgccgctgatgaccgccaaccggtgcaccggctttccggtgtcggcaaacttcacctgtactgccgtgccagtgtccggcgcgttgcacagggcagccagcttacgctgcgccagcgcggcaagttccggcacggtgatggggtcgattttccccacccggccgcagccgtctgcaaaggcggcgcgctgccgaatgccgaaaagatccgccagcacatcgttcaccccgccctcggcggcatccagattcgtgtgcatacagatggcggaaatgcccgcctgcaccagctgatagggcacatcggcggggcacagccgcttgagcgggtcaaagatgaccgggtggtgcgccacgatgatcgtgcactgctttgccgcagcttcctccaccacctccggggtgatgtccagcgtcaccagcacccggcgcacattgccgccgcagtccaccagcaggccggggttatcccagtgctctgccagttccggcggggcaagccgctgcattacttcgtatacctgctgtaccgtggtcatttcagtttccctctttcagaatggcatccatctctgcggcaagcgggctgccgtccggcacgcccagccgcatccgtggcagctttgcccgctgccacgcggcgtagcccgcgccctccggccagcgtccggtatcccccagcagacattgggtaaaggtgggctcggtcaccttaccggtgtactctgccgccattaccgcgtaccagcggcctgcggcctgcaccggacggtcggccacaagggcaaagccatgctgccacagccagcggcgcagctcgctgtgccgggtggcaggcaccatgataaggcgcggcccgcccacggcggacacccacggcgctttctcaatgatctcccaagtggtctgtgccgacacgcctgccagcacaatgctgcccacctccccggcagacaacacagaaagaccgtcgccgagccgaagctcagcgcggtccagacaacctgcattttccagcgtctgttttgccttggccagcgggccggggcgcaggtctgccccgatgaccttcgggtacttacccgaagccgccagcaccgccgtcagcttgccgtggtcgcagccgatgtccgccaccggctgtcctgggcgcaccagctctgccgctgcggtcagacgcgcatccagtgttggcagcactcaggccttcttagctgccagatgggtgttcagcttctccagcagctcgtcgcagttcacgccgtgcacttcgcaggcttcctcgatggtctccccgcgggaagccgggcagcccagacagtgcatcccgatctccataaagtagggtgcggtggtctggtccatatccagaatgtcgccgatgatggtatcgcgggtcacctgcttgggtgcggtgtgtgcctcttttttgagcatattgaaaatatcaaacatgatagcttttcctttctgttttgggtgagatacagtataacctactgttcctctatactataccccaaaccggggcagttttgcaagagccttggggaaatccgcttacccctccgcctgatagttcttttccagcgagaagccgcgcccgctcacctcggtaacatggctcacgatcataaagcaggtggggtcgatagtgtgcgccagcttttccagccttggcagctgccggttggagaccacgctcagcagcaccgactccggctcccgcaggtagccgccctcgccgtgcaggatggtcacgccgcggtccagctgcgcaaagatggcagcgcagatctcatcggacttggcactgatgatcttcacctcggtgcgggtggtgcccagcatgagcaccttgtccagcacgaccgtgtagataatggccatcaccacgccgtacagggactgccgcaccgggctgaacgccgcctgcgccgccagaatgataaagtcgaaaaccatcatggtgctggacaccggcaggtggaaccacttgttcagcaccagcggggggatatccatgccgccggtggaagcaccggcgcggatggtgatgcccagcgagatgccgatgccaaagcccgcgaatacggtgttcagcaccagatcatcggtcagtacaagattgcccagcaagcgctcccacagcgccataaaaaagggactgagcaccgtgcttgccatagtattcagggcaaagcggcggcccagcacccaccagcccagcagcagcatggccacgttgaccacgaacagcactgcggacaccggcagtccggtgaccttgttgaaagccagtgcgataccggtagcaccgccggtgatgaggccggagggcatcagaaataataccacagtcagtgcatacattgcattgcccaccacgatggacagtgcgttgaagagctgctgttgcttgcgtgttaattgcgtcatcttcatcttcctttgtttatagttgaagtatcttctactatgataacgaaaatatccgcatttatcaagccttcggcgataaatgcggatatcgggatcgatttttagggggtcacagggcagcttccggctgggcttcgtcctcttccatcagccgcagaccggcggtatcggtcaccggcagcgagaacacgatggtgcccgccttggggtttgccccctccataatggccttcatgatggtgttcttctggctggtgcggctgacgatgagcaccagctccttttcgttcaccagctccacgcccagaaaggcggctgcaccctccatgccggtaccctttgcgtggatcaccgtgccgccgcctgcaccggcggtgcgggcagcatccataatggagccggtgtagccctgatttgccaccaccagcagcagttcatagcgggtatccttcaaggtgctctcctccttccatgtaaggggctggtgctcggtaaggaacatcagcgcccgtttgccgccgatgctgctcagcggcacaatgaacgcaatgccggtgcccggcacatcgatctgcattttgcggcgcagatccttctggatcttctgccagctttctgccgttaccacggccagcagcaccgccttttcggtcttttccagcccaagggtggaaagcgtctcctgcaccgccgtgccggaaccaacggtgcgcatacttaccgttacgccgtggcttttgtacagctgcaaaaagccatcggtagagcggcggtcggtgatggtgatcatcaaaaacaaactgctcacgttctgcctcctttacagctcgataatggcgtcatccggcagatctgcaaacacggtggcaagtaccgcagcgggctgcgccacacgcgccttgcgggtgcgcagctgcgccaccaaccccatcatctgcacggtgatgagcggggtcatggcgaccatcgccaccacgccgaaagcgtcggtgacgatattgccgcccaccgccacgcaggcaccctgcgccagcggtagcaggaaggttgcggtcatggggccggaagccacaccgcccgcgtcaaacgcgatggcggtaaacagcttgggcactacaaaggagatgctgatggcgaacacatagcccggcacaaggaaccacaggatggagatgccggtcagcacccgcaccatggcaagacccaccgagatagacacacctgcggaaagcgccagacccatagcctgcgccgagatagcgccatcggtcacctcttccacctgcttgttcagcacatagaccgcaggctcggccttgacgatgaagtagccgataagcatcccgatgggaatgatcacccagcgcatcccgccgcctgtcagcacctgacccagatagttaccggccggcataaaacccacgtttgcgccggtcagaaagagcacaaggccgatataggtatacacaaggcccacgccgatgcgccccagcgtgcggcggtccagccgcagggcgatcagctgaaaggctccaaacatcagcacgatgggcagcagcgagcgggcgatctcggccagataggtgggcagaccttcccggaacagctgccacagctccaccgagtctgccacctccggcagaacaggcgggatgtaggtgctgtccgctgcgcggaacgcgatgcccagcgtcagcactgccagaatggggccgatggagcacatggccaccagaccaaagctgtcgtctgccgcatggcggtcgcttcggatcgcagaaacgcccacacccagcgccatgataaagggcacggtcatggggccggtggtcacgccgccggagtcaaacgccacggcgaggaactccttgggcacaaaggttgccagcagaaagatgagcccatagaacaacaccagcagcttcggcagcgcaacgccgataagcatacgcaggaaggcaaagaccagaaacaggcccacgcccgccgccaccgagagaatcagcgtgccgcttggaatagagggcacctgatctgccagcacctgcaagtccggctccgagatggtgataaggaagcccagcaaaaagccgagcacgaggatgaggggtagcttgcggctgcgggtgatgactgcacccacccgctcgcccatgggggtcatgctcatctctgcacccagagtaaagaacatgatgcccaccacgatcatggcagcgcccagcaaaaaacacagcaggatgctgggcgataccggtgctaccgtaaagcagagcaccagcacaatggccacaatgggcagcaccgcctgcagcgcctccaaaagcttttcccgcagcttggggagcgatcgtctgagaatgatgtccaccgcctttcgtctgtatcctgtttgtacacttttgtgcaagatatatttatagtatacggattcagggggatgccgtcaatccgcagaaggaaaaaacttgagcatattccataaattgtaaaaatatattactcacctttatgtccttccccgtgaaaatggaataccggagcgtccgcagacgctccggtattccgaacttataaataatttttccgctgaatatggccaaagcgcacgcggcggccattcaaaatcgtcccgctttacgcctttttcggcttcagccagccgtccacggcggctaccagcgccttgccccggcggcccagcaggcggggcagcagcaccctcgccatggcccatacgcccgcaaagttgtacaggatgataaccagcgtgatcagccccgtccacagcccgtacagcggcggctctgccagcagcacaaaggcttcaaataccagtgcagcggcatttgccagcacccgcgccgggtggacgcgcatcccgatcatgcggcgggcgtccaccgcacgcagggtgaacaccagcgcaaggccaaggaaggacgcataggtcgcgcccacaggcccccacaacttgatgaagaagtagttcatgatgcagttgctgatggcgcctgccatcatggtgaccatgctgcgctgcgactttttggtcacaacgtacacgctgttcatgaactggttgaagcagctgcaggtggaagccagcacgaggaacggcacaaagtgccatgcgtagtaatagttggacttcatgacgtgcatcaccgggcggcacagccagataatgcccgccgcgcagcagaacagcacgctggaataggtgcggaagatcttggtaaaaaaccgcgcacgcccttcctcctcggtgacggcggaaagctgccacgcatcgtagaagatcagacccagcgtggtcaggatggtgggcaggaagtagccggtggaaagcagaccgctccatgcgttgccggtgcgtccgtccagcccttcgcacatctcgcgcacaaagaacaggtcggaggcgttgatgatccagaaactgatctgcgccgggatcatgggcagcgagaagttgagcatctgccgccacagctttttgttgacgcccttcagctccacatagttccacagcttgccggtgaacagcaagaacagcacgctggtcaggtcaccgctgataatggccagcaggtagccgttggcgccccacttgaagcccaccagatacagcacataaaacgccatggtcgccacggtgcacagcacgccgtccactgccacaagcttattccactggcggctgcgcacgaactgggtgcacagggtgcgcaggcagctcatgagcacataaatgtagatcagcaggccgtactgcgccatatccggcaaaaactgggtgaccggccagcacagcaccagaatgccaaagccgcccagaatggtgagcaggccgttggtgaacacctgtttttcgctgttgcccttgtccagaccaaagcggatgatggcgttggacatacccatggacacaaaggggatgagcaggtttgcgtactggctcaggatcttggacagacccagatccgagatctccgccatggcgtaggtcagaaagggctgtacgatcaaagtgagcagcttggacgaaaagctggagattgcaaagatcaaagtattgccggccagtttggaatatttatcgccggtctttttttcgttttccaagggaatttccctccgtttttacgatagattatcttttcagcagctcccgccggaccttccagtccggcagcagcttttccacctctgcccagaaggccgggctgtggttcaactgcaaaaagtggcagtactcgtgtactaccacatagatctgcgctgcagggggctggttatacagctgcaaagcaaaggtgatctgccgcttagccgggcagcacacgccccagcagcttgtcatgctgcgcactttcaggatgggcttctgcccgcccagcaccccggcaaaggccgggtagaccttatcgctcatggcggtaaagtaggccagcgctgtggctttatccggcaggtcggcgttgtccttgttgagcttcgtgatattcttcacccgggtatcccggatccactgggcgttttgcagcacaaaacggtcagcctgctccagactggccgtcaaagggatgcttaccatcacggtgccgttgctgcgcacccgcagatgcagctgctttacctttttgcgcaccagctcgtactggatgccctccacgctgcgcagctgggcgcacggctttgccggcatctcaggccttgctccgcatcaggcggccaaggggcagctgcgccagcaccacggcggcaaacagcagcacgcagccggtagattcccggaaagaaaggttctggtgcagcagcagccagccgcccagggcgctgaatacgctttccagacacatgatcaggctggccaccgcggggttcaggtcccgctgacctaagatctgcagggtgtaggccacgccgctggacatcacgccgcagtacaggatgggcccggcgaaggtgacaaactctgccatggcaggctgctcgaacagcagcgccgccacggtgctttccaccgacaccacaaaaaactccacaaggctcaggcgcacgccgtccatctgcggggagaaatgatccaccgccatgatctggaagctgaacagcaccgcacacaaaagcagcagcccgtcgctgctctggatgctgccaaagccgtccttcatgcacagcagatacagccccaccacggcaatagccatgctcacccacagctgcgcgctgcccttgcggcccagaaacaggccgaacaccggcaccagcaccacatacatggcggtcaggaagcccgcctttgcggtggaggggtccagcgtgatgcccagctgctgcgccgcgctggctaaaaacagcagcgtgccgcacacaagcccggctttcagcagcagcttgcgctctgccgtcgttttgggcttgccgtccggcctgccctgccggtggcgcaaggcgtcaaatgccttgaccgtggggatcagcaccagcaccgccatccagctgcgccctgccagaaaggagaacgcacccatgccggagccggcgctctgcgccacaaaggctgtgccccagatcagggcgcacagcatcagcagcattgaatttttcgtctggttcgtcatccggcaatgccctccaccttcatcaggccgtacaggtagtaccggctggaatcatacgagatggtcacacggtactgcgccgccgggtccagcccggaaatggtgcagcggtagtcggtgccatcggtcttgatatagtaggtgctgtccggcacatactctgcgccgccgtccacctttttccacagtgccaccttgaacttctgggtaccctcggcggtgccgcaggccatgatgttcacactgccgcccggcacagtaaagtagccggtgttgcggctccagatgccgttgaacaccgcgtacaggcagccgtctgcggtggcggtggcatactttgccgaggcatccgcaatgccctgaatgatcagcgggtcggtggtggcttccgcccagcgggtggtgtcctcctcctgcacttcctcggagtggccggttatcttctgcgccacctttttcagggtctccttgcagccggtcaggctaagcaccatcaccgccgccagcagcaatgccaaaagctgttttttcatcttcatagctttcctcatagaaacaaagaaacttttctttttcgtgcgtctctgccaacgggcagatacagggtaagtataccgcattttgccgctctgcacaagatacctgtatttattttgtgcggtttgccgcctgtttctgcacaaattttcacgtattcagcgcccgcagcgctgcgcactcggcctcggccagcgcgggtgcctccggcccgaacaggctgccgtagcggtacagtgcccagccgcccgccgcctgctgccgtaagtcctttacctgcgccgccagcgcactgccggtgctccagccggatacgctgtccgggttcgcgccgccgtccccggtgcccacccggtacgcgcccagcccaaagtacagcgccacatcccccgcccggggatagctaagccacgccgggacgatgttttcaaaggcaaagcgggtgctgccggagtgcagcgtaaagccgtagccccagtacacctgcgggcagaggtagtcaatgaccttttcccccccgcccgccgccagccacgcggtcacatcgctgtactgctggtcgaggtcgttgtccgggttgccctgcgggctgatgccgaaccgcagggtcgggtctgccgcctttaccgtgcggtgcaccttcgccaccagcgcggtaacgttctgccgccgccacgcggcaaggtcggctgcgccgcttgccgcaaactgcgccgcgtccacagcggcgtcggtggtggggtaaaagtaatcgtcaaagtggatgccgtccaccgggtagttctgcacaagctctgccaccccctgcaccacatagtctgcggcggcaggcacggcagggttcaagtacagcccctccccggcggtgcacagccagtccgggtgggtgttggccagattattctctgccagattcggcggcatcgccgccgaggagcgcaggcggtaggggttgacccacgcctccaccccgatgccccggcggtgcgcctcggtcagaaagacatccagcgggtcaaagccggggtccttgccctgcaccccggtgcacagatggctccacgggaacaaactgctgcggtacagcgcatccccgaaggggcgcacctgcgccaacacggtgttcagtcccagcccgacgcagttgtccagcagctgcgccgccccggcgcggaaggtgtcctcggtggagaaatccagcagcgcccagtccagatagctcacccacaccgcccgccactccccggcgggcagggcggggttgggtgccgggggcgtatcctgcccggaggcagcagtgtggtctgcatcgcttttctgccgcaggtaccaccccgccgcagcacaggcggcaacacccgccccggtcagaaaggctctgcggccaaagcggcgttttgccttggctttagacgtcctgcggcgctgggtcacagggtctcctcctgtgtcttatacagggtaagccccgcccagccccgggcgcaggtcagcagcacaaacatgatattcgtccagaaggcaaggccgctcatgcccgcgtacttggtcagcatccagaacaccagccgcagcacctcagcggcgctcaccagctgcagctgccgctggatgggcttgccgcgctcgtactcggtggcaagcagcgcaggccacaccagcgccgagcagatatcccccgcccagccgctggcacccagcttgctgagcatcagcaccacgaacacgccggtgtagttgcgcttttcccttgccggtgcgcccttctgcgccgccagaaacagcaccgcgatgccggtaaggcagaacacgatcatttccagcccggaaaaatccatcccgcccagcacggcaaagccgcccagcatggacactgccgctgcagccagcaaaaagaaataccatgtcttgcgtgtaaatttaagcttcatgaagccctcccccggacgtttgcgcccggcttgcagaaaaatttaaaaaagaattgtaaatattatagcacaaacccccgcaggttgtgttacaataaggaaaactcttttggggagggtctttccatgaacgctgtcgtttccgtctgtcttttggcctgtgcgctgggcatcatcgtgtacctgctctcccggcgggagacaacccgccgcagccagtacggccccgccggcctgtccgagttccgcaccggccttgcgctggacgaatgctttgaccgtctggacacccgcagcgacaccgacctctttgcctacgagtgccgccgggagaacgacggcagctttctgctgcacctgacgctacaccagcccagccagcagccgctggacactttgtacaccctgcggctggaccccggccgccagaccgtggtgactttgatctttatccgggaggcctttggctacaaagagccgctgttcccgcccgccatgctggacgaatttatgctgcaaaagctggatgcccaccgcaccaaatgatttttgcggaaaatgctttcctttttgcgcggtttttgttatactagtgcgtgttgcagcaatgcagcacccatatgggccagtagctcagctggtcagagctggcggctcataaccgccagaccttaccgtttccaccttttccaaacagcgtttttccgttgttttttggtttgctagtggcttaaaaatcggacttgggtattttctgggtacgaaagccactttacagatctttgaaacaacgtcataagggccattagcttaacggttaaagccggcggctcataaccgctccagtgggggttcgaatccctcatggcccaccaaaaaagcacgagattttgcgtctcgtgctttttcttttgcctgatggagcaatctcacttgtacagttctctgctcatctgtttccgaatctcatcacgccgcctatcatagacctgcgtgtaaattgcaagggtagtactgggctgtgcgtgtccggcttctgcggctactgtcgccacgccgatattgggattggacaacagaatgctgacgaaggtgtgccggaacatatgcggatgaattttttcaatgcccgccttttttccaacacggcgtaccaatgcgccatagctatccgggttgataggaaaaccatagtcgttgcagatcacgaagtcgttcccacgcaaatccaaaagggactgtgcgtatttggagcctttcttctccaaattcttctgccagcttgcacccatcagcttcttctgggctttccactgtgcataatagtccttcaggaaatccatgaactccggcgcaacatccacatcacggatattgctttccttcgttgtggtaagctgatagccatagttcggaaagaccagcagggattttgacacatggatcgttccctcgcggaagtttacgtctttccatgtaagtcctgccaattcaccacggcggacacctgtgttcagcaagcacaaaacgattgctttttccagcatagaacattcttgtaaggcagcttgcagagcttctacctcatcactatgtaagcaatccaccgattttccttttcgaccagatgcctttatcattggcatttgaagtgatgttccatagttatcattggcgtagttcagaactgaccgaatgaacagattgtactctcgcatcgtctttttcgtcatgggacggcgatcaatctctacttcaaacatctgttcaacggtcttacctaaagccgttgccacctgttgtgccgaatccaaagataccgtttcgccacggaagattcgctcaatggtttcctctcggatggtgcattccttcgcaattttagggcaggacaccgttttgaactctttagcttctggtttcaaaactgcacgtttgtaaactcgtgcgtcactgtcctcaatgaagcgaatcatcgaatcacaatccttttttgtaatcaacgcaatcggcttttcagaaaactccggataacactggatgcgctgaagatatttttcctttttcaaactcgtgttctctttattcctgttgctatcatagtcgcccttcagacgaactgaaggtgccatacgagaacggtttgaagctatgtactcctgcgccactactgcaaaggtctttcctgcattgctggcttccttgtctgccttttcctgttccagccgttcaaattcggcagcggcagctttcgcagcggcgttgcgcgcacgagcgtttttcagttcggtggggtcaaaatcgaaccgaccataacggcgttcaattttgccgttcaccagaacatttgcgatgagtttataataacgaggcttctttttgggttctcgcaattcaaacgatgccatatatttaccgtcctttctgtgtggtggttatctctgtcacgatgagtatagcagttcgggcggttaatttttaggatgtcgcagtttacgcccgcatccttgacaaatcacaaagttgtcgttccaccgttgaagtagtcagccatcttgccaaggttgatgtaccacttgatgcctgactggaacgccatgcccggcacttcccggcaaaggcggcggatgtaatattcaggcaagcccatacgctgacttgcctgcttgatgctgacgatctgcggcagaacaaccgcttcggtttggatctccggcgataccatcactttttcattcatcggcattcctcctgtcccattcattgatttccaaactgttcatcagggcttcttcgatcctgcgcatttcatgccgtgtagtctgtcctaagaagcgctgtatgcggcttttgtctatcgtgaagatctgttccagctgaaccacagacggcttctcaaaggctgtattgtgggctatcagaacgtgtgtgggctggtatttctttttctcggtgcgggaagtcactgtcgccacgataagggtaggcgcatagcggtttcctacgtcgttttgcagaaccaccacagggcgggtgccaccctgctcggagccgatgtgcggctccatgtctgcatagtaaatgtcccctctgaggtatttccagtcttttggtatgatagcgatcagacctcctattcttctatatgtagcaagagccgcctgtcaaaaccgggcggctcttgctagaaaaaggagtatgcctagaacggcaagaatgtcactgcttgatgggaagattgaagcggcggctggcaccgttgtaggtgcgcaggatcagcatcatatatttgtagctgaccgtgccgctcagagatttctcgtcgtttaccaacgtcatgggatgaacagtgtgcagccgcttgaccagacgctccgggtcatactcgccctgatacagagccacaaagcgaaccatgccctgcaggatgccggagcggagggaatcggggtcaccctcccagccctttgccagcatggtcagggcttctttgtagaggtctgcgccgtaggctttgtattccttgaaagccgtgcggatgcagatgatcttccacggggcacggtagctgtccagaccgatctgcagaccggtgctttcggtggctttcacgaatgcgagagattccgggtctttgcccaccaaagcggcgcgcagctctgcgccagcggtcagcggcgtggaaacgcccgtctgccgggaaaacagcatggcttcttcttcctctgtcagtccctcatacaccttgcagatgatcggaagatcctgcccgccgttcatcgcccgacgggtcacgatggtatgctgaccgtcaaagacgaagtagtgaccgtcccggtagctgaccttgggcgggttggcaatcagttcggtgaactccgccgacatcttttcgacattggggatgttcagcttgcgctgatattccgcagggatttcgagaaaggcactgttgatgaccttttcttcgtaaggccgctgcgcgaaaagggcttcgatgatggcttcatcggtgatttcgggcatgatctcaggcatagtgctgacgcagttcatttttttcatagcagttcctccattttatcttccagatttttcaggtaatctctcagcttctgaattgttcgctctacggatgcacggttctctgcatcggacagaatatcgggatattcccggaaaacactttcccagcggcgcatcatactgttggcggctcccgatacctcgcaaagcatcgcagtcccatcggcaagtcgtttgggtacatagcggctgtttgcgatttcaagaatctgctgacggtcgattttcaacgattcattcactctttgtggaaaagtctgctcctgcggagccggagtgtgaaccagttcttcgtccgtgcattcttcctcggatgtactggaatcggaaagcggtttggctgctggggacgatgttgtttcgacagctgcggctttcttctggtctttgggtttgcagatttcagccaccagtgccagacgttcttcaggaggtgcgcgggcaacggatgcgatctcggcggcggtcggcttgacctcgccggaaagcactttctgtcgtgtgccgggaacggcttcttcggcagcatctacacctttggcaaattcttcagcacgaaaaactgttctcatgcccacaccgttctctttggcgactttttgacaggtttttgaagtgggaatcaggttgccaatttggcaacctgattttgcaacagcactttttcgatcaccaccgttggaacatttttcagcttcatactgtttcccgataaggtacttcttctgttccggggtgagattgcgccgccccagctgattcttgcaaatccagatgatggcttcatagcggtttgcaaactccgtttcatggacagtgtacgggatttccgggtgcttcttggcgatgatgaaacggttgtgtccgtccacgatcagcccctcccacacgatgatgggattgatgatgcgtccatcccgcaggatgttggcttccagctggttcagctcctcaaaggtcagtggtgggatcttgccctgaaattcagggtcaactttaagcgcattcagattcatcatcgaaccgtcctttcttaaaataggtggctttcgggctggtgggctggatgtagtagtcgtagccaaagttggtctggcagtaggtgcaaggctccttggtgagctgataggggtctgcacggcggacacggatgccacgggcgttccgaaaggcggtcaggcagcgggggcagagggtggtcagggtcgattcatcgggctggtgagtaaaattacggctcataatcatttcctccgtttcgtatgggtgagtgttcggtatggaaaaagcccgccgccaaggttcaaaagaatccccggtggtgggcttgaagttttgctttaagttatttccaacctatttgtcctcgacccccgttggatttggaatgcacctcggtaagtggggacttgcacccacactccacattggcttcttcagccaccccgtcttcgttatgaccgggccgcgagttacggaagtttcattattttgtccgagggaatgatattcagttttcaaggtacgctttacagctttgggcttctccccgtctggggtgttgcccttgctgtgacaatagtttatcgtagaaacactgtctttttaaggaactggtagttccggttttgcaacttttttgagcggatttttctcgaaaatcggaactaccagttccggtttttcgtagatgcgtcagaaaaaatggtacaaaaaaaagaagccgagaatcgcttctcgacttctttatggtggttatacagatgcagatgtatccagctcgtcaataagattactcagcttatttttgaagatctggattttctggtgctgctttttgatctgtgcattaagctccctttcccgtggagtgtccaatacgccaagaatcaaaaagtccagagtggtgttcagtgaaatggctacttctaccaacaaatctatagaagcagtgccttcccctcgttcgatctttcccaaatggcggtcactgatattcagctttacggcaaattgctcttgcgttaagcctttggttttgcgcagctgctggatgcgttttcctgtgatgtaagaatcaaagtacataagccagccctccgaccacagaacaacgcagtcgcaagctgcgccacaaggtcggagtgcagggatgcagtcggcggcgaaccaagttctggttgccggggctcggttggtactcaatcaatctccttttcatgtttcttcgtcctttctttgtcgatgatggcaaggcgggcggagtatgaaggacgtacagaacatccttcacaatagtaaaagagccgcaactctattgctatccatgtagaatcaaggaatcgtattcagcaaattcaaaacagcttcctgctggtcagggcgaagtatcgaccacttctcaatgatctgcatctgctggggcgtaagtgccaccgggacagactcacttccctctgcctttgcaaaaaactcggaaagcgtgatctgaaaggcatcgcagatctttacaagcgaaggaatggtcgggattgcattgttattgtaccatgtagaaatggtggaagttttcagctcggcgtgagtcgctaaatcgtatagcgaccatttgcgttcttcacggtaggcgattatagtgttcagaatgttatccaccgccactcctcgctttcgtacaataaacttttgcttattataccgtactacgcaaataattataatccttttcaccgtataaaaagtacggagttcgggagttggcgtttcatcctgacatcttagcatctccgagtaataaaaaaaacgctgggagaaatctcccagcgcaagcagccctaatcacggtaccgacgtgtgccaatccaaagcggacccagcacccacaaccaaggcagtgaaaacattctcgtcacttttaataccgtaagcaccagcgttaaagcaaacaagagggtcattgtaattatttcggaacggtcaggtttcttctccatacgcagattacctcaaaaaatccagtcacgcctgagaaatagtataaaagtcaagatgcttcatccggttcggtaggtgctgcggtaatatcgcggtagaaagtggcccatgcagcttcctcataggggcgcacgaagaagaagccaatgctcaatggaattgtcagaagaagaacaagagaaagcgccatagcttcggaaccggtgaaatatttgagaaccagaaagcccccggcatacagtggcagcgaacagagcagctcccagccaatgaagctgaaatccaaacagaacagccgccatttgttgccgtccatgattcgccgggattctgtgattgcttcatttgcggtcagcgaaggatgctcggacatgatgtaaggtgtcatcgcatagctgtatgatttcacgattcccggaatcaccaacagcagcgaccagagggcgatgtacagaccctgcaggaatttcatgcagaagccatcccacagacggtctttctgagagaacaagtccgagacagccgcatcctttctatctacaaggttcagattaaaacgtgcatatcccagttgaactgcaccgcccacgatcagttggaggattgcccacagaacaatgccggcaagcagaacagcaagcagccgaccgccgttaggctgggagaacagttcaaaatggatgtcctttgcctgatcggaattggatacgatactgttggaactgctcacaatggtagcaccgagcgcactggcggcaatgcctgtcagaactgcagttttccattttccgcgcagtgcatcgagagcaagcatacgataatcggcagatactttcataaaagcaacctcctgtctgaaaacggcaaggatgtgtgaaaaggcagatgatatgccactttaattcagatacgtttgatacaatgaaaaaattgcgacacgaataaaaaagggtctgttgcaccggttttatccttgtgcaacagaccctttcctttacttcagcagcttgtccagttcatcataaacggatttgaccttcgtgccgacaatgacctgacaggcgtttttccccggacggatgatgcctgatgcgcctgccgcttttacggcctgctcattgacctgattgtagttcttgaccacaaagcgcaggcgggtagtgcagtagctggcagatactacgttgtctttgccgccgatgcctttcagaatgtcctgtgcaaccagtgcatatttgtttgcttcggcagggtcagcctttttctcagccgctttgttttttccggagcgggaaaaaagcacaaaaacaacggcacacacgaccacaacagcaaggatgacaagtaatgttgatgaattcataaaacttctccttttacaatcagataagacgcagcgcgtcctcatctgcaaacactgtcgaatgctctttgtttaccctaacacaatatctctgttctgtctagtcccttttcagctttacacggacattttttctttccttgtggatcgctacaaattgccactccgtcgtaagtctcggataatgcgtaagggaggaatatgccgcacggtttctgttttcggccatatagtcccgcaaggtcacctttgaaaaccgagggtcatggagctgcgcttcttcggggtgcggctgctccgattctacgctcggttccaattcgatcggttcatcggtcagccaagtgtccataagacaatattgttgttcctttttctccgggtgaaagcgataatgaaggatcacataattggcggggtacttgactggtccctgctttttgaaagggtgttcgatcacaccgttttccagcacagtgaccgtgatcatttccgcttttttagtaagcggattctgaaacacgatatgttgcccggcttcttcgatcttcaagatcggccccggcacaggttcatccggtgcttccagcatcagcgtcagttcctgatcgtgaactgacaaaagctcacttttgaaatacagccggaagatgacccacccggtattcagatcgaatccgtagtgttctaccagctttctggccgagtaatgttcctttgaggcaatgggagacattcggagcggattccagatgaaccgttccgaacgccattcatcaatacagtcgtttcctgtcaaaagatgtcccataggatgaaaatgaaaaggatcgtattgatccatcatcagccgttccagcggcgaatggaacccggcattcctgtgcttttcatagatcgtcaggcggttcttcaggtgataatatggcagcttacgagccacatccactaccaatccgcccggaatcggaaagactgcagggatcagccattcttcctttttccaagtgaacgatacatccattctgaccgcatcgttacttttgattgccccccataccatagtgggatcgaccatctgctgatagtttgctaagcgctccataaaactgtcctcacctgttttttaacgaaaaaagacggctccgtataaccgaagccgtcttttatcaactgtggaaatggaaactcactggacgaatttcagttttccaaccatgcgtaatcaaattctgtaaagtcgtgaatgtaatgtgctgcgccaagctggatcaaatccgacccgtctgctttttcaccgactgcaacgatctggcctgcgccatttcgtttcgccagagtgatggctgcaacactatcctcgatgaccatacattccgagaacggaacattcagtcgtctggcagcttctaagtgcatttcgcctttatcagcataggttccatcatcgtagacaacatcttctttcttcaaccatttcccgatggggaagctgtcgaagtaaaagtcaacgtttgccttgatagaagcacttgccagaataaaggggatgccgcgctcatgcaagccttgcatcaacttctcagcacctgctacgaggtgtaaactgtcaggatttctcctgcacatcctgcgatacaattcctctttccgctccgaacattgctttcgctcatcggcattgagccacggtgccatgttctgaatgatcgactcattacacggtccgcagatcaacttagggtcaaggggattcggatcttcgggatgcaattcatgatagatctctgaccacgcctccatgtggaagcgggtatcaaagaacatcgtcccattaaaatcaagaagtacagcgtgcattgtagctccagctttgaattaagcgaagataccaaagaatgcgccgaccagaccgatcaccagcagcagagcgatgcaggtaacgggcttccagttcttcttcttcatcaggaagaacaggccgagggtcagagccagaggaatcagcttgggcagaacgccatccagaatgctctggataacgatggggctgtcgccgttctcgataacggtagcaacggtggtgccgccgtagttggaggtcagagcaccaacgatgaacacgcccagcatggaagcggcacgagtgaactccttagcgtttgcagtcaggatgtcgatagccttagtacccagattataagaccagtacatcaggaagaagcggcaagcgaactgaacgatgttgaagatcagcaggaacatgataggaccagcaagcgatccgtttattgccatgttcgatgtgatacctgcggtgataggaaccagagtgaaccagaagattgcgtcgccgataccgcccagaggacccatagcagcaacacgcacggcacgaatggtttcgatgtccgccttctgctgttccagagagaggatgatgcccataacgaaggtaacgaggaaggggtgagtattgaagaactcaaggttatgctccatggagagcttcaggtcttccttgttatcgccgtggatcttttccagaccgggcaggatgcagtacagccagccggcagcctgcatacgctcgtagttgaaagatgcctgcaggttcagggaacggaacaccatcttattcagcgtagccttatccaaaggcttcgcgggagtcagattgttgtaatgagttgcattagatgccatcttcgtcgtcgcctccattcgcagcaaaaccagaaccagcagcctgcttgatagcaacgcgagtctggtagtcgtacagagcaatagcaatgcccacaaatgcgatcagcagcagagcagagccggacagttcggggatgtagccgatgatggttgccagagcaaaaccagcaaagtagatgccccagaactcgttggacagcatgatacgcagcagggttgcgaaaccgacgaaacgcatcataccaccggcagcgcccagaccagccatgacccatgcatacttggcggccaggttgctcagggtagtacccattgcagagccgcccagcataccgagggtgcagacgatggcgaacagcaggcccagaagagccattgccagatagttcagacggacaatgcccttagtgtcgccctttgctgccagctggtcagccttggacatcatgggggacatgagggtgaacaggaaggtaaccatgtactggccgatcagagcgaagggaactgccagaccgacagcagcggtggtatccagatgagaagagatcgcaaacacggtagccatgacgccgccgatgactgcgtttggcggctgagcgccgccaacaggcatgttaccgatggtcatcagctggtaagtaccgccaacgatcagaccggtggggagatcgcccaagatcgcaccgatgacagcaccggaaacgataggctggtacagggattccaagaaatcaaactggtcgatggccacgataaagacccacacaaagaccagaatgatctgaagtgcactaaagcccataataagtactccttttcaagtatttaggagagcagccgtctgtttacttgaacagcttgtcggtgctttccgcatgttcggtaggaacacgacgaatctccagttccacaccgagttcctgcagccgcttgaaagcagccacatcggaatcgtcaactgcaacggaacctgccacctgacgcttgccgtcagccatgtgcatattaccgatgttgactttcttgatgggaacgccaccctccaccagcttcacgacatcctgcggattctcgcagacgatgaagatcagctgttttgcgcttgccttgtggatggtgtcaatcgtcttctggatggtccagtagcgcatagatgcgtacgaaggagcagccatattcatcaggccctgacgcaggctgttgccagccacctcgtcattcgccaccagaatcaggtttgcgccgattgcgccgcaccactgcgtagcaacctgtccatgaaccagacgattgtcgattcgagttagaacaatgttcggcatttttttattcctccttgaaattttttgtctgagtttccaattcagagtaactacattataggcgatatttgaacaaatgtctttatattttttaacaaagtgtttctaaaaatcggttattttcgtggcttctcattacaatcttccaaaactcgtcggaaaaagctagtaatattcaacaaaaaatgttatactcaatacaagtttgagagaaggaggattctggatatgcaacgcgaaacttccaacgacagctttctggagtacggccagacctaccacgaacccatcaggctcacacaccctgacctgatccaccagcatcagaccgccatcacccgccgctatgtatcacagttctattgttttaactgtgatacatatatagaggtacatgacggcatcggtgttttgctggtctcccatacggcagatgccgcagatgtacaagagtttgccatgaaccggctgattcacatcaagcccaatgtctattttgcggtggtttctaccacacaaaagctggaattcgagctgtatgccgagagcaactattctctccatgttaccgatttcccttcccagtatgagttccttgcggttctgccccgtattgaaatgcagaagatcttggggtattattatagaatccgcaccccgaactactgcttcaagggtgagcagcataacttttttgagttgacgtatgtagacgagggcgaactcgaaactgaggtggacggaacactgtaccagctgaaagacaaggaactgatgatctacggtcccggtcagttccacacccagtatacggatgacagccacaacgcatcctatatgacggtgctgttcgatatgcgcaatctgacccctgtggaacaggaggtctggtacgatgctctgatcaaccgggtgttccactatgaccagaaaatcaactccttaataaaagcgttcgtccgggaaagcaccacgggcattccttatatgaacagtctgatgctctgtctgttgactgagatcatcatccggcttctgcaaggaacctatgcttctcccatgaaccagcccagcaattccgtgcacaagagtgcaatggatgaactgtttgaccggatcattgcctatattgatgaaaacatctaccttcctctgacgatcccggaaatctgcgaacacttttcgctgtcgcggacagcgttgcagctgatgttcaagaattccatcgaccagtccccgaaaaagtacatcaatgataaaaagctggagagaagctgccagatgctgctggaaaaccgctataccatcagtgagatctccctgcggctgggctacacctccatccattatttttccaagtcctttaatatgaagtatcatatgtcgcccagtgagtttgtaaagcagaatcttcaaaataagaagtgaaaggaatcctctatgaatattggaatagttggaacaggctccatcgctcatacgatggcaaaggagtttgcgcgtcctacaacaatgcctgttgttgccgtgtgttctcgcaacgcagacactgggatcgcaatggcccatgagtttcatattcccattcccaaggtctataccgaatacgatgaaatgcttgcggactcggaggtggaactggtgtatatcgccactcccaacagcctgcactttgagcaggccaaggccgcactacttgccggaaagcacgttctctgcgagaagcccattgttcccaccgtggcgcagctggatgaactgctcagccttgcggaagagcgccatttgcacctgctggaggctattacgaccatcgaccatccgaactatggtctggcaaagctgtttgcaaaggagattggtgacatcaagacggtatcctgcaccttctgtcagtattccagccggtatgatgcctttatgaatgggcagactcctcctgtgttcgaccccgcctactgcggcggagccttgatggacctcaatatttataacatctattttgtggtagggatttttggcgacccgaaagccgtccattattatccgaaccgccacgccaacggcatcgacaccagcggtatcctgattctggaatacccgaattttgtctgtcagtgtacggctgcaaaagatagctctgcgcacaacagtgcccagatcattggcaccgagggcagcatcctgattgagccgggcagcaacgactgccagaaacttgttgtcacccggaagggaaaagaaccctacatcagtgaaatctccgatacgccttggtggtttgaagttcttggcatctccaacttcctgattgttccgcaggatgccgtcaaagagcggcgcattcgtgcaatgagatcggcggtagccgtactggaagccgcccggaaagacgcccacctcgacttctaaccgtaaaatacaaatctttcaccgttttttactcttgataaattagtaacgactatctataataatggtggatgtttgtatatcctatctgccgttacgaacaatcggctcttgtaaggcagagtaaatgatgagaaggtaaatgtttcaggagggtaattatggctttagtcactaccaaagaactgatgcttgatgctcagaagaaccattacgcaatcggcgcattcaatgcagagaacatggagatggttcaggccatcatcgcagccgcagaggaactgcgcgcaccggtcatcgtccagaccaccccgggtactctgaagtacgcttctccggccatgttccatgctatggtcgcagctgccgcttccgaggctactgttcctgttgtgatgcaccttgaccacggcagcagctacgaactggctatgaaggcattccgtgcaggttacacctctgtgatgatcgacggttctcaccatgttttcgaggagaacatcgagattaccaaggaagttgttcgtgcctgccatgcagccggcatccctgtggaagccgagttgggcaaggtcggcggcaaggaagatgatctggacggtggcaatggcaatggctacaccgttccttccgaagcagctgagttcgtggagcgcaccggtgtggattctctggctgttgctatcggcaccgcacacggcgtttacaagggaaccccgaaactggacatcgaccgcctgagcgagatccgcaaggtcgtttctgttcctctggtgctgcatggcacctccggtgtcccggatgatgccgtccgtgagtgcgttgcccgcggtatgtgcaaggtgaactacgccaccgatctccgcatcgcattcagcaagggtctgaaagaataccttgcaggcgatcccgaagcatttgacccgaagaagtacagcgcagttggtcgtgagcaggtcaaggagtacgtcatgagcaagatccttgtctgcggcagcaacggcaaggcataatttagtattcatccgtcttaacccatataagacattcttccttaaggattggagccggtgctcttcggagcatcggctctaattcttttttcacttaaagacagaacccccgcaacggtatggcaaaccgctgtgggggttctatcatggaaagaagaggtcttggatgacttgttaagaatgtaaaaagacaggcaggaggccgcgcagcactcactgcctgtcttttcacgccggtgatggagggggattttgcaaatgaagaatttatgaaaacctcgtgcgtaaatgaagaagaaaacacacgagatcaacgctatcagaataccaaagcaattactttacgatgctctggacggcataacgggaaatagtaataacgatcttcggtgcaacttccacacggagagtatcttcatcctccatgcttacgatcttgccgtagatgccaccggcaaacataatgcgggaaccgaccttcatgtccgtatggacttcgctaagttccttgcgcttattgcgcatattcttggcagagatagcatacaggatgagtgcgatcacacccataacgactgccagtgtaacgcaggtccaaagaattacttcccaattgatcattgtttagattccgtcgctttcatcagattcggcttcttcggcaggagcctgtaactcaaagattaccatacaatccttgccggtgtcaaccagttcttctgcgagagagcgaggatcatcttccatatccagcatcgtgaccgcagtaacgatcatcggcaggttcgtgccggcgatgacctcgatcttctgatcggggcgtgcgtacttgcactcaactgccgtcttgaaaggagagccacccggcagatcggacagaaccacaacgccatcgcaggtgcggaactcgtcgaatgcggcgttgaacttctccgccagctgctccggggacataccctcttcaaagttgatgtagcggacgtactcgttctcgccagcgatcatctgagcggaagtgtggatgccatcagcaaaatggccgtggccggtaactaccaaaccgatcatgttcgttgccctcctgattttttaattacttcagcgtgtacggatacagggtgacacccttgacaacacggttcacctcaccagtggggcaggggttgtccggggtaatgcccagagacagagacttcatcagagcgatggtctgagcaaacaggatgaagtccagacccagcagaacgttctccatgtcctgaccgatcttgatctggatggggtaatctgccagctcctcaatgccttcgcaatcgtggttgtaaacaacgacgatcttgttgcccttgcgctgatgtgccatttccttgaccagatccagctcatagcggcggcggtactcatcgtcgctcagataagcgatggtcagggtgttatcatcaatgatggacttgggaccgtgacggaagcccagctcggaatcgtacatggtagcaaccttgccggcagtcagctccagagtcttcagtgcggactcctgtgcaacgcccttcaggccgatgttgcccagataaacgatacggttgtaatcgaactcgtccacgatcttctggacttcaccgaactggtcatcgaggaagtgctgacctgcaacggccagcttctcgacctcggcagtgatctcatccagcttgtccagattcagtgccagataggttgccagatacatattgctgtagctggaggtcatggcgaaggactggtcatgggtctccggggtcaggttgatagcgaagcagttcttgcggcttgcagccatcttggacagagtgccctcgtggttgcaggtcacgaacaggtggtacaggttctggcagacgacctctgctgcttccacgttgcccagagactcaggagagttaccggaacgaccaaagttcaccagcagggtgggcttggtgcgggacaggaagttctccggggaaggaacgatatcggtagaagcgtaggacttgaccttgtagttgtacttggggttcagagcctggaacagggagttgccaacgaactcgctggtgcctgcgccgaccagaacgatgtcgaagtcatcctgcttgacgacctgatcgataaaagcctgcagctcatccttgcagccagccagctgtgcgcaggtcttgcgccaagttgcaggctgctgatagatctcgtgtgcagtaaaagtagaagatgtttccttcatcttctcatcagtcaaattaaaaatgctcatctttttctacctcctaatcggttggtattttgtccgaatcacagacagggatcaccagagcgcactctccctgccattctgttatatcacaccccaatagcagaaaacaagggggcaactgaaaggcataacttttagtttgaaaaatgcaaaccgaagccgtgttttctctgctgaccgaccattttttggccatgtttgccgaaacaagtaacaagtcgattgaaaattataaatatttttccgaaagaatgcggtataatggcacaaggataattcactcggaaggaggacaattcagatgataattcaaagtaaaaaagtatggatcgctgatcagtttgtgcctgctgctattgaggtcaaagatggtaagatcgtcggcattttcccctatgggacaaaggatgtagatgacgattacggtgacaagcgtatcgtccccggctttatggacatccactgccacggtgcctatgagtttgacaccaacgatgcaaacgaggaaggtctgcgttactgggcagagcatatcgtttcggagggcgtgaccagctttctggctaccactatcacccagagcgttgaggtcctgaccaatgccgttgccaacgttgcccgtgtcatggagggcggctacgacggtgccgagatccttggcatccacttcgagggtccttatctggacatgaagtacaagggcgcacagccggagcagttcattgcaaaacccagcgtagagcagttcaagcactatcaggaagccgcacacggccatatccgctatgttacgctggctaccgaacaggacgataactttgaactgacccgctacctgacttcgcagggtatcgttgtcagcatcggtcacagtgctgccacctacgagcaggcagtcatggcttatgccaatggcgcacgctccatgacccatgtctataatggtatgacacccttcaaccaccgcgcaaacggtctggtgggtgcagcataccgcatccgcaccatgtacggtgagatcatctgcgacggctgccattccaccccggctgctctgaacaactactttatgagcaagggtcccgactattctatcatgatctccgatgcgctgatggcaaagggcacccccgtgggcagcaagtacatcttcggcggcaacgaaatcgtgatctatccggacggcagcgcacacctgacctctaccggcggtctggctggctctaccctgaacatcaacaagggcttgaagatccttgtcgaggatgcaatggtaccgttcaactatgcgctgaacgcctgcaccatcaaccctgcgcgctgcctgcatctggatgaccgcaagggttccattcaggtgggcaaggatgccgacattgtggtgctggaggacaactacgatgtgctccagacctattgcaagggtcaggcaaagctgtaagatcttgattcaataaaaaggagaatagaaatgaaacatccccttcaggaaatgatggataagcgccgtgagggtatccgctgcggcatcccctcttattgcagtgccaacgaactggtaatcgagatcgccctgcgccgtgcaaaggagcgcaacatccctgttctgatcgaggcaaccgccaatcaggtcaaccagtttggcggctacaccggcatgaagcccgctgatttctatcagatggtcctgaaaatggcaagcgacatcggtctgcccgaaaacatgatgattctggcaggcgaccacctcggacccctgacttggcagaagctgccggagtccgaagcaatggaaaactccgtggaactggtttaccagtatgcacgcgccggctttaccaagatccatctggataccagcatgaaggttgcagacgacccggaaggtctgctccagaccgaggtcatcgctcgccgtggtgcaaagctgtacaaggctgctatgaagggctacgaggaactgaaggctgagaagccggatgcaatgcgcccggtgttcgttatcggcagcgaagtgcccatccccggtggtgcaaccgaggcagaggatacgctggctgtcaccaagcccgaagcattccgtgataccgtttccacctatcagcgcgtctggactgaggaaggcgttggcgagggcatgaaggacgttatcgcagttgttgtccagcccggtgtggaatttggcgatgagcaggtgttcgactacaaccctgccgcagccgttgacctgtgcgccgctctgaaggagttccccgacatctgcttcgagggtcactctaccgactaccagaccgcaaccgacctgtacaacatggtcaccgacggcattgctatcctgaaggtcggtcctgctctgacctttggtctgcgcgaggctctgttctctctgagcatgatggaaaaggaactggtgccggaagaaaagcgcgccaacttcatcgaaacactggatcaggtcatgctggcttcccctgcaaactgggaaaagcactaccacggtgacgaaaagcatctggcacagtgccgcaagtacagctactccgaccgtgcccgctactacatcggtcagccggaagttgttgcagccatgaacaaactgttcgacaacctgcgcgagtaccccatccccatgaatatgctgcaccagtatatgcccatcagctatgccaagatccgtgagggtcagctgaagctcgacccgcgtgagctggctatggacggcattgtgcagttcatgctggactacgagagcgccgtctgatctgccctttttgcacaccaaagaagaaggaaatgaaggagaacccatgaaacagtttacttataccatcaaggacgaacttggtgtccacgcccgccccgccggtctgctggtcaagctggcaaagaagtatgccagcaaggtcaccattgaaaaagatggcaagacctgtgatatgcgcaagctgatggcagtcatgggacttggcatcaagcagggcgaaaccatcaccgtcacggttgagggtgaggatgagaccgtcgccgcagaagaaattgctgcattcctgaatgagaacgtttgatcgtctcacctgatttgacatccacggtagcagattcctcctgctaaaactgcccggaacgataggagaaggtcgttccgggcagtttttatagtattcagaacattttgatgacccacaggatcaggataatggcgattgacacagcaagcgtgatcaggaagctgtggtctttctttccgttttccggtttggcaggtgccgtgggcttctgctcttgtttcaaagaggtgataccgtcccccaaccgcttctttttggggttattgttgcggcggtagatgcggttcagcgttcccatgtagtggctgtaatccacaggtgccgaatcctgttgcgaggtggtttccggcttcttgttttcttccataatcacgatgtcctttccgtccgttcagcaggtgctgtatttcttttattataacatatcatctgcaaaaaatcttgtttttctatcgggattttaagagcgtcctttattatttttctcatgatagccgttttcgttccgccaatagacagcgttcgttttgtatgctagactaggtgtatcaaaatgtcaggaggtaggtgttttatgaaccgtcccgtttgtcatgctgaaatggttttggattacaagatcaagattgaaaacggtatgctctttaacttggtcacgatcaaaaagaaaaacgaccagaaaaaagtaaaagcggcattctgtccttcctgcggtaagatcgaattgtacactgacattccttccggtgaaaaagaataaacacatccagtttccggggatgctgaaacgatgctccccgggtaggaggtaagagaacccatgcactttacaactgttactgcaaacccctgcattgaccgcacgattcaggtggattcggtcaaccttggtcatagccatcgtgtccagaaaacgatctgcgacttttccggcaagggcatcaatgtttcgctggcacttacccagcttggaatgccggtcaaaagcgtctgcctgagccattcagatggagaagcagcggatttcttcaagcaaagagatatggatgcagagcttatccccgtccccggaaatgtccgtatcaatatcaagctgtttgaaacatctacgggctgcatgacggagttcaacgaaaagggcactcctctacatcccgaaactgccgtggatgttattcgcgctgtcaaaaatgttctgcccacaacatcggtgctgatccttggcggcagtgtgccaccgggctttcctgacgacttctactatgaacttggcaaaagcgcacaggaatatgacgtgccctttattctggacgcatcggggccgctgcttctgaacggaatggaggcatctcctgttctgattaaacccaacgaagaagaatactatgccaccttcggcgttcatcccagtgtaacgcaggagttctgcgcaagctatcgtcaaatcctcatagagcacaacattgcctacggcgcagtttctcttggcgaaaagggtgcgctgctggtcacaccggaagctgcatggtattcggaacctgtttctgtcgatgtaaaaggcgttcagggtgcgggcgattccatggtgtccggctttgcctatgcgattgccgaacagcacacccaaggagatcagctgcttaaaatggcagtttcctgtgcacacgcttctctggaactgcccggcacgcaaatgtgcaccatggcaggcgtggaaaaaagattcccgctgacgccagttaagcggctttgcacgttttaatttgaatcagctttcttgcaagctgaatttcgatattaaacggaggggctatgggagccagcaaacatatctgcccaaactgcgggcgcaagatgaaacagcagttcattggtctgttccactgcaaatgcggcacaagctggcggcgtgatataggattttttgaacgtactccagatatggtgttctcactggaacgcaaaaaagtcggaaacaaagtcaagcagttaccgacgatacatcataagtaagcaagaccaccagccgttttttcgactggtggccttttttgtgcttaatcctctgtaataccgagatattggtcgatctccatgatgccctccccgctgatttccaccagatcttcaaagggcaccacggtgtcgcccacttgcaaggtgcggaacaccgggtcgatgcggtctgcttttccggtcagtgtgatgtagttacccactgctggaacctccgggtgggcggtgtcttccttgaagtaccgcaccgtaatggtcatgcccttggtgacctgcatcagccgatcggacagagcggacatttcttcctcggtcagaatgcgcttgggcacacgctcggtgcgctgcttttctgcggcaagctgctcatcataacctcgcagtgctgcaaagggagagaagatcttcgcccggttctgcaaggtcatgcggggatgcttgcgaagggattcttcagtctgggggcgttccatctctatgatatccccatacttttgggcagtctcttgtccgatcttgctatttttgtagttttccatccgaacctcccgcgctgtgcccgccaatctgcgcgttgcgctggcgcatggtggcaccctcttcgtagctgctggctttcagcacggcgtttttgccgtacttgttcttgatgcccaacatggcttgctggagttttttctccttttccagcttcttggtgtcggtgaaaaagtccacctgatagatgccctcgtccggcgtgaccttgttggcgttgatggtgatgcgccgcaccgtcagcgccgggtcggtgatgcgctcaaacagctttgcgctttcgttgatgatggtgctgcccagattggtaggggcatcaaatcggacggtgccgtgtgctgccttggggataattctgccgtagcggtcggtctgggtcagaccacggtagccgcccttgtccacgttctcccggtcgtagcctatctccaaggtgatggattccgtcaccagcttcttttcggtaaggcggaacatcagaatttccgccatctcccggacgacaagcttggctttgtcgttggggtaagggcaggtcagcacctgtccctcactgatgctgttggtgctgggcttgtagcttttgatttgttccatgccgcagggttcgtagccccatgcgtggtcaataaggatttctgcatccacgccaaaaatctcatacagacgatcttccccatggattgaaaaccgtgccaagtcccccatggtgtagatgccgtgggcttccagccgcttgacggtgccgggaccggtcatccagaaatccgtcaggggtctgtggttccacagcagataccgataggactgctcgtccagctctgcaatgcgcacgccgtccttgtccgctggaatgtgctttgctacgatgtccatcgccagctttgcaaggtagaggttggtaccgatgcctgccgttgccgtgatgccggtgttgtacagcacctcccgcaccatggtcatggcaagatcatgggcgctcatgtgataatagggcagatagcccgtcacatcaatgaaaacctcgtcgatggagtaggggtagatatctgcaggggacacatatttgaggtaggtcttgtagatttgggtggacacatccagataccgctgcatccggggcggcgcaacaatgtaactcaagcccagtgcagggtctgtgttcagggcgttggcatcgaaagaggtgctggcaaagtggtacttgccgtcctctccccggactgccttattctgccggatggcagtctgcagccgctgggcgttgacctcccggacacgctggacggcttcaaacagccgcgctctgccgggtatcttgtaggcttttaaggagggcgacaccgcaaggcaaatggtcttttcggtgcgggaggcgtccgccaccaccagattgatggtcagggggtcgagatggcggtctacacactccaccgaggcatagaaacttttcaggtcgattgccagataggtgcgctgcgctgccatacttcagccctcctttgtgttatttggtttccacctccacgaaccatctgccgaaccgggaaggaaaccgtgggtcggaacgctcgaaaaataagcaccgctcctgcccctttatcattacagtataacagtcgccgggcatatcggcaatggtatttgcagggcgaaagtcccgcacctgttcgatgggatacgtccgaccatcgccccatgtgatctgccggggctgcatatagccggttgcgtcaaaatcagaagtcactttcacatagaccttttccgttttgcgacggcagtttcgattcattcttcacagctcctttgcaaaataaacaacaactatttatcttattataataaatctttacgctgctttcaagataaaacggctatttcatctgtgatacagacaacaaaaaagagtgacagcatttcaaaccgaaacgctgccactctttttcttgtttgcagttcctgcaatatcttcaacttttaatttgcggactgaaaggacgcatagcttacgcaagcagtgcattcgtctatacaaatgcctattttgcgctgcaaaatgcttgttggggacaccccaaaccctttcactctgcaccgttccgatgcaggctgcgcattcctgcggaacgctttttacccggtgatgctctccgggtcagtgaggacttgcatcagatgggatgccgcttcatctaaatattcgtatttatctttttctggaatagccgatttcataagcggaacatcccactcctgcatacattcagcaagctgctgttgtgcgtgctgtgcagccgcctttcgcacctctggggtgacatccgaatccagaacgtaagcaaccgtaaacttgccgctgcaatcttcagtaagctgcaccatcgaatcgtgttcttcccagaagtaacagaaccagacgcggccaccgataccctccatgccggagcgcagttcttcctcatcgctccactgcggaacggcagcaagaatgtcctgcaagtcggtgtaggcttgctgctctgccggggtcacttttttgcagcggtattcgtgttcaatgttccgctgccagtacagagccagcttgccttgcttggcacggtcgattccatcgttgatgtcggaaaggatactgtatcgcggttctcgcatcttgttcacctcgaaatcaattctttgggaatgaatacatcctataagaaatattatagcctaaagaattgcaaaagaaaagcgcaccagccaaaattaagctggtgcgccagagttgccgcaggattattcttctttggtgaggtaaggcagattggtgatataggtgtccagaaggtcaagtgccactttcttctgcataggggtcagtccttcaagccgcttgctgatttcatcatcggtcacatgagatgcacttggaaccagatcgcacaaaagttcgtctgctgaaatattcagggcattcaagattttgacaatggttgcaagccccggttcctttagtccgcgctccaccatcccgatatagttggcagaaaggtctgctttttctgctacttgctccaacgtcaaatgatgtttcaaacgctgttcccgtaatcgctgtccaaataattctttcatagagcaacctcatcctatcgagttgtttacactctttagaatacctgttgccgttcctcgtatacacaatcgaaagaaacagtgcatcaccatagggattataagacaaaaaaagactgccgggaaccgacacgatcgtcagctccggcagtccagcattaacgcacctgttctgtttcgtgcgtctgcttttcttctgcaaagaaccgttccacatttttctgtgcgcgaaccagttcctgcatttcttctttggctttgcgatactccggatacgctgctttcttttgggagagcagttcgaaatattctacgttcaaatcttttaccttgggcaacttttttaagtccgcttcgtcaaaggcggctttcgcagccttgtgcagttcgatctcttcccggtgtgcttccagaaactttttgctgtatccggccttgcgataggcggcgtacgcatcgcgggtctttgcgtaattgactatgtgcgcccgcaggacagcgatttctcccatgcgcttctctgccgctttgatggaatcgcccagcgtgtgataccgttctgttgccgccgctgcacgttcccgcagttcgtccgcactgtcaattttcttttcctgcaagtagagcagtgtcttggacatttctttcaggttaaaccttgttgcccattttttatatccactggttttgctctcggccattttcgtgggaatatccaccagcaggccaaacttcttttctggcaagggctgtttggggggcggctggtgttcagccttgccatccaacaccattttgatttcttcctcggtgtatccggctcccaatgtgcgaaatcggataaatcgccgctgccctttgcctttcaccgagggatgcttgccacgcttcacctcatagccctgctgttccagcgcatccagaaatgcagcaaaatctttgagcttatcgtgcaacaaaatgttgtcgatcacagtgcagagcttgtcacggttgctttctttgggcgggtataggatgcgtttctgccgctcccgatagggctttttctgaataacggaaagctggtgttccaagcaaatcaggtcgctcagccgttgcacagcaagcgcggaaaagtaaaaatcccgaaatttccgtgtaccatctaacgcagtggaattataaataatatgattgtggatatgcgcacggtcagtatgggtggcgacgataaaggcgtgttttcctttcaaaaatcgctcggcaaattcatagccaatcttgttagcttcttcgggtgtcacttctcccggcctgaaagactgccgtacctgataggcaatcacatcgcttttttgcctgcgcccggtggtctgttcataaagtcgctttgtcagcataaattcttcgtctactgtcaagggactgcactgatagctgctgacaagttcaccctgctcggttttgtctgggttttggatatagctggtgtggttattcagacaggcggcaatggacttccccttatttttgcgcatggcaatcaaccgtgttgcagccagttccatcacctccctaaaaaaagaaaatgccgcacatcggcggcatcaagatcatttggatattttttcgtaatcggcagcacccgccagatacattgccttatatcgggcgcattccaactcgttgcagatttcatctaaggcgaggtattgcttccatgattcttggctgatgacgctctgcaaggctttctcagccgctattttggcgtttttcagtcgctgatagttttcatcctcacccagcatttcagaaaaaatcgtgctgctgtgcgcataatagcaatcctccaatttctggttttccatagcatccctcacaatccggcaacccagccactaaaacgctctgctgcatctgcaatcaaagcgcccatgaaaatcaacacaaagcatccaaactctgccaccagcaagatcaaaaactgcagccactcccggcagtacagcgtataaagaccgcagccgaaaatatacagcatgggcagagccagtacgaacgccgacaggttcagtgtccatttcagcatcagcgcaaggaaagcagtaagcagccaaaacgggaaaacaatcatcttaaaaatgaacctcatatcaagcacctgcctattacaatatatttggaaccggatatggtagccagccatattccattccatctcgttcctaagctacaatatgtttaccgtgtttttccaacacgaaaataggttccgttacaagttctttcgatattgttcaattttcaaggtcctgtgcacctcagccttgcggctgacagcttattcattttatcactttcgtgataaattgtcaagcatttttttgagaagcttttgaagttttacgaacttggagcgctttgaacatctcagtgtcaactggtgttttcagcgtctattggttcttttcaagggctttctgctgagacttcagaagtcattcttttgtctcagcgcttggcgctcaagtataataccacacaccggtgctcttgtcaacactttttgacatcttttttccaatttctttgcacggggggtaaatgccctctccactcctctcccagcaaaagccttgcgtatcggcggcgggtgcgctattatatattatatacattatagagcgctgcgaaaggagccctgaccatgatcctcaccgtcaatatcggcaacacccacattactgtgggcggctacgagcaagatacccttattttctgcgggcggctgcactccgaccccgctgccacggtggaggaatacgccatccggctggtgaacctgttacagctgtacggggtatccccggcgcagatcgagggcggcattctgggcagcgtggtgcccatgctcagcgggcgggtgctggcggccttacagcttttatgcaaggcgcgcatcctgaccgtgggaccagggctgaaaagcggcatcaagctgcggctggacaaccccgcgcagctgggtgcagagctgctgtgcggcgcggtggcggcgctggcagagtgccccgggccgctggtggtcatctcggcagacacggccatctccctgatggcggtgaacgccaagcaggaacttgtgggcggcgtgatcctgcccgggccgcagctttccatgaatgcgctggtgcaaaagactgcccagctgccccagatcgaccctgccgcccgcgccccggagtcggtgctgggcaagagcacctcggcctgcttacaaaacggctttgtgctgggcactgccagcctgctggacggtctggccgaccgcttctgcgccgagctgggcgcgcagaccgccttttacgccaccggcgatttgccccgctccatccgggaggcctgccgcacccccatccactaccgcgagaccctgatcaccgacggcctgcaccgcatctggctgcgaaaccggaagggctgacgattttcgtttgcattttgcattccgatgtgttatactgtgttgtacccaccaaaggggtacggcatttgcgatcgtagctcagctggatagagcgttcggctccgacccggaaggccagaggttcgaatcctcccggtcgcaccaaaccatgaaaatccgaaccttttctcgataggagaagggctcggattttttgttttcttcggaaacgagaacaatggctcttcccttacggctgtgtgtccaaaaccttatcagaagaaagaccgtatcacgaaggtcacaacagtaagagtgccgtaaggcagaagggacgcaagattatgaagtacgatgcaagagcctgtcagtttaacatgggcaccggctgtgtggagctgctgctccgggatgggcgcaaaatttccatcaactgcaccggtgtcgaggatgcactggatgttaccatggcgcagaggtctgaactggactacctcatctacaatgacccgctggcgtatgcagagctaattttgaacggtgagccagaggagtatctgagaaatgcggctggaagtcacggattagaggactgaacgcaaaaacagggtgcgccctgccggacgcaccctgcaaaaatccacacacgataagtaaggcagggagttccccgacgggaacttcctgtttttctttggttgcgatatgagcctgttccgcctgccatgcagcaaattcccgctgtcctacctcgctgttccagcaggcaaggatggccgggtagaatgcccgtgccagacggtcgatgacttcatcgggatagggggaagtgtttgtggactttttctttttgttcaaacgcacgctcctttgatcgtcccaccgcagcaaagtcgggcgagaaaatcaaagttccaatttttatcaggcgcaagggcgcggatgctttccgccctgcacttgcggctgggggctcgttgatggcttacaggtgtctgctgttatgcggtcttttcttcttcaagggcttctgcaagagccttttccagataggtttcgatttcagtcaggtaattagcaggtctctgcattgcgaagcggagaaccttttgcttttccgggtcagtgaaatagctgggattgtttttgagcgttttcttccatgagtttttcatcatttcggtcgcacggctcaaggatttgtaaaccttcataaactcgtccggtacatgatagcaccggaattcttctgtttgtggtgtgggcatgggaacgggttctgctttttcaggttcaaattctgcactggcagattccaacacttccaatgcctctggatgcaggatttgagcaaggacatctgaacgatgctcggcacttacctgcacgagtttggacatttcttcgttggtaaacttcacttcgccggaaaagactttctgcttgatgccgggagagaggttgtctgcgatgtcgatgcctcgtgtatagtggctggcgcggagaacggaggcgcggctgacaccgttttcctctgcgatccggtcacaggttttctttccagagtggtggttatcaccgtgatcaccaccacttttctttgctaaagtgtactgattaccccgaaagatttttgcagctttcttttcagcttcatactgtttcccaagcagatagcgtttctgttcggggctcaggtttcgccgtcccaactgattccggcaaatccacgcaatggtttcttcgcggttctcaaattggagcggcgtagtggaaaaataaatctcaggatgcttctggagaatggcataacggttgtggccgtcaacaagggtattgttccaaacgatcaaaggagagagcagcttgccttccttgaggatgttttcttcaagctgcttaaattcatcatcggtcagaggaggaatctgagactggaactccgggtcgattttcaggttgatcatacgcacactcctttatctctcctgctgcgccggttcttcctcccggaaaaaggacgcaacattctgctttgcggttttcagcttgagcagctcgttcttggcttccttgtactgctcgtagaactgtgccttttcggatgccagctgcgcatactcggcttccagtttcttcgggctgggcagcttggtgatatcatttgccttgaaataagctgctgccgcccggtgcgctgtcagctctgcacggtgctgttcttcaaaggctgcgggtcgttttgcagcttttaactgctgtgcgatgttcttggtgctggcgtaggctgcgacatgatagcgcagctctttgttggctttcatgcgaccttcgagatctttcaccactgccagcgaatcgtggaacttggtatcaagctctgtaattctctggtcgagtgcgtcctcgttgagcagaccattttcctgcaagaggatcaaggtctgtgccatagctttgaggttgtgttttttcgcccaacgctcgtagccgatgcccttaccctgcttcagcttcgcctgaatatcgatcagtttcccgatgcggtcagacttggactggatagtgcgcttgcgttcggtattggctttcagagcggcaagcacaagttctttctcgaacttgtcaccgatgttgcgcgcccggatgaactttgtccttccagcaggcagatagctgagccgtccacggctttccttgacggtaatgccgtactgctgcaagagcctgtccgagaaatcttcaaaactcgttgcaacattgagaacctccgaaatctgtctccgcaagacttcttttgcggtttcaaacttcgtttgtgtgggctgctgacctgttgcgagcagggcagcgttttcatggtcgagtttcagttgacctcgctgtttcatccagtattcgcgctcgctcacacgaaccttcgagccgttgagcaggtcgatctggtacagtccagcaccttcgcacagctccatgacctcgacacgcaagtgccgcatggtctgggccgtgctggagtgcttcataccctcacaccagtcgcggggcttttgcatatagggcttgcgttccacttctcgcattcggatgctgccgatcacgatgtggacatggatgtttcccgaatggttgtgcccatcggggtgagtgcagacgatggcgggatgaccggggaagttttcttcgcagaatttcaggccaagtgcctgtgccttttccatggtcaagccgttgtcggctgcatctcttgggtcaaagctgatgatatactggtggcttttaatatcaccatgctgggtgttcttgccatacttgcggtttgccagcagacaggccgttgcaaatgagaaatcaccgcactcaagggtgtcgagcaggtaggattcccgcagcttcggcttgccctgttcatccagaagctgctttccggtgaactcatcgtgttggtagatcaggtacgcttcaatggcggtgtagtccgagttcttagaggcgatatgcttgagcgttgccatacagttcacccagaactttctcggcgtgcagccgaaatgcggtcaggtctgcaagttcgtcaaggagtttcgcccggatctgttcggtgtctgcaccgccggaattgaagtgccttgcaagctggttcaggttgccgcccaccttgctgcactgagcaagcagggtggaaacagcggtcagggtttcttcaccgccgccggcaacgatgaccgttttctcgattttgacgttgtgaatggctcggcggataaaagtggagagggagagattcaggagtttgcaagtgagttccagtgacgctttttcctccgctgtcacacggaacttgatgacgtgcgttttgttgttcggcgtgtcgtggtgctgggaattgctaggggtcagttgaacattcgttttggtcattgtacctcctgtctgttcgataactcctcggtgaagttatgtaagcacgacacgccgttgcggttcgcaccgtcaggtgcgaaccatgagcagggtttggggcaggcacgccccaacaagatcacttcggaaatgcagacgcattgaagaagtgaagtcccggatggacagaaaattttcaagaattgaaaatttgtggccacgggacggttcttgccctctaccgctgcgctcaaaaccgtttctgggtaattgtttccgaattgttaagacgcaaaaataagtagagagttccactgctcgtgtatgttgatcgccgtttgctccgaacgaagttcctgcccctgtttgtgcagcggcgttgacgaaaagtcggtatcacgttcggtcggctcatgaaattttcaaggtgcgtttcccgtaaaagaaaaataccgcccatgcagcatagcgatggattttgtcgggtgaaacagcggcaaaatgaatcgggtgtgttgcggggcggtgaatttttcagggataatccacggcgaggcagtgttcaaaatgaacacgaccacatcttgtggaaaggttcaaaccaatccacaagagcagtgggatttacaagaaaaataccactgtgtgtgaaaatcgtcaagagggttttgaaaaatttgttgaagtgaagcaagaaaagtatgacacatcttgtggctttaggaaaaaatacgctatgtgaatcagaacaaatcccattttctgtctgcggtaaatccttctactgccagctgcaacaggatgttgcttgtgcattcaagacgcagacggcaataaaaacggcaagatcgcctgctgccaagtgaccttgccgttttgtactgtattttgctaaatcaggcagttgcccgcgactttacaacgctacgttgaccggcagaacatacacaccgtcggcggtgtagtaggtgatttgagtaacagtcttgccgatgatggaggcaagataggtctcgtccgtattgaagcccagctcggtgccgcgccagatattggtcacatgatgcaggccatactcgctgccatcggcggtggtcagcactacgccgtagaccttgttggcgctggtgtccagaccaaaaccggagagcttcatctcgtaattcgcgtggcggccattggtggtcagctccacagtaacaccctccacggtagtctcggtggcgtggactttgccaaactcccacttgccgctcaacaggttgtaccatgcggtaatgtagtaggcaggagtctcgccgagcttatagtaccgcaaagcccttgacctttttgccggagccatgctgtatgtggtggtggaggaactgatcccggaaatgtcgcagggacagcactccaacgttggcacggtacttttcgtggtgggcttcagcgtgatgatggtgctggatgtggcactggggtaacggttgggggctcccgaaagcgaaatctctttcggaatctccgaaaatgcctaaacttcttgacagaggagacggcagggcgtattattttggcagaaggaccgttgagaagcggctttttatagggttggaagttagctaaatctaacttatcggtgcacgtggtggttagataaatctaactataaaaggagagacagcaatgcgagcacgcaagaatttctgggacagaaatgcaggtctgtatgactgctttatgcgaaaagacaggatagtatacgaaaaaatgtatgagctgatctgtccggtcgtgaaagacaaaacggtgctggagttggctaccggaacagggctgatcgccaagcacatcgtaaaagcaacggcacacatcgaggcgacggatgcctctccggaaatgattacagaggccaagcgggggaattactctgcgaaactgcatttttccgtgcaggatatgttttctctgccatactcgagcaaatcattcgatgtggtaatcgtatctaacgcactgcacatcgtgccgcagccagaaaaatcactgcgagaaatcaaacgggtgttgaaggatgacggtgtgctgatcgcgcccacctttactcacgcagaaaactcatttcccggcaaggtcaaagcctttttcatgaagctggcaggctttccgcttcacagcaagtggacgaatgaggaatacctgagtttcctgcatcagaacggctgggcagtacgaaatagtgtcgttctaaaggcctcttttccgctgacctatacggaatgtgtgaaatcggaggtgtgatatgtccttttttgaaaacacccgaaagcccgtaggctttggcgggaagatcatggttgctatgatgaactttggacacagcgcaatggcagaatgggggctgcgctttttaaagcctgccccggatgccatggtgctagactgcggctgcggcggtggagcgaacattaagacactgctgaaactgtgccccaacggcaaggtgcagggcatcgactactcagctgtcagcgtggaaaaaacgcgaaaggtcaatgccagagccattgcggcaggacggtgtaccgtgcaacaggcaagtgtggcagaactgccgtttgaagcggagcagtttgatgtggtgaccgcctttgaaacggtctatttctggccggaacttgcgcagaatttcagagaggtttatcgagtgctgaagcccggcggggtctttttcatctgcaatgaagcaaacggcgaaacaacaaaagacgacaaatggacgcagatcatcgatggcatgaccatctatacggacactgcactgaaagagtatctggagcaagcaggattttgtaagatccagaaccacaaaaataaaaagggctggctgtgcatcacagcacagaaatgaggtgcgatcatgtcgaaaaaagcaacggaatttcaaagaaaagcaatgagctggatgtaccggggcaaggaaatcttcaagcctttgaacaccggctggatcgacgagaatgttgcctgcgtgcgcgaatgggtggcgaacatcttcttctaccgcaaaggcgatacgaccattatggtcgatgcgggatataactacgaccgccttgccgaaaaaatgggctggcttgggattgatccgaagtcgatgcaccatatccttatcacccatcaggacaccgaccatgtgggtgcggtggaagcagacagtccggggctgttccggaatgcgaagctgtacatcggcgagatcgagaaccggtatctcaccggcgaggtgcggcgaaaagtcatctatcatctctataaattgccgcaggtcacgatcaacaacgaaaaggtactgctgcacgatggacaggtacttgacattgacggcgtcaggatcgagtgttttctggttcccggtcatacatggggacatatggtctacctcattgacgataagtacatttttatcggcgacacgctgtggtttggcgcggacggcggctacagttttatttctgcgctggcagaggataacaagctggcagtgaagtctctgacactgctggagaaaaagctgaaaaaacgcggactgcatccgctgttcattaccggtcacaccggctggacggacaacatggagtttgcctttgcgcacaaaaatgagctgtgctcgcccttcaagaaaaaagtccacgacccatcggcaccctatgatgcctacgacgaatcggatgacaccgaagaaaatgcaaagagcggttttctgaaaggcgtgggaagatgaaggacagcgaattacaaattgaccgtagctgccatgtgctatattccaaaccctgcaaaaaggaaattctggcgaaaatcactctgcactatccggaggtggagcgcgaggtggtctgggagcaggtgcagctgagatacgcagagcttctttccaagtggcgcaccgacctcggcggtaaaaagaattttcacaacggcgtaggcggcacctacgactgcatcgccatcatgtgcttttacgatgtgtgccgggatgtggtcacattccgcgaaatggaagagatagaagaaaatctgatcctgccgtccttccggaagctgcgattcgttgacatcaacaagccattctggaaaaagctgatgtatcgggcattcagcaccgcccaaaagcactgtgacacatggcatgattacgagatggatgttgcgccttacgaaaacagcaagcccatctattatgaatttacgacgtgtccggcggcggaatttgccaagcggtttggatttgcggacattatgcccgccctgtgcaatgtggactatgcgtccatggaactgctccatgccaagctcgtgcggacgaccacctgcgtggacggctgccgatgcgactataccatctgcggcgataaggatccatacgtaaaggaacatcccgaataccgggatgaaaacggatacaggaggaataagtaatgcttttacaggtgattctggaaggtcttgggctgggggcactgctggttctggtctgcgctgcgggcatccgcaaaggggctgttgggatggtgcatctttaccccatgggacaaccgtttgcgagtatccagtcggggctatatgttaggttacagcgacctgaaagacccttccgtcagcggttttttccggtttctcgccaaggtcggtgacaacggaatgaaaatgcagatcgtgaagatcggatttggaggcaagctatgaaaattctggtatatggtgcaggcgttctggggtgcaatctggcaagaaatctgctgcgcgccggaaaggatgtcactctgcttgcgcggggaaactgggctgcggagatcaagcagaacggcctgcggatcaaggacaaattttcgctccgcacctcggtcagccgcattccggtggtgactgaacttgcaccggatgcaatgtacgatgtgatctttgtggtcctgcgctatacacagctggattccgttctggacacgctgcgggcgaaccggacgaagaacatcgtttttgtgggcaacaacgtacagacaaaagcattggcggcggcacttccggaaaagaacgtcctgtttgcctttgcgctttctgcggggcatcgggaggttgaccgggttgtctccatcgacctgaaaaagatcaccatcggacagctgctgggtgcaatctccaataaacagctgatcgggcgcatcttccacggcacaaaatataaggtcgtttacgagccgaacatggaggactatctgctctgccatgccgcgtttgtgatgcctgcagccttcgcctgctataagacagacggcgacctgaaaaagctcaggggcgataccgcgtacctgaaccgtgtgctggatgccaacatcgagggataccgcgccatccgagatgccgggcacaccattctgcccaaggaggatgcagactttgaaggggagaaataccgcaagacctgcctgcgctttttcaagctgatgtgcgccacctcgctgggaaaactctgcgcctccgaccatgccatgaacgccatcgacgaaatgagtgcgctgaaccgggatcttaagaaatttttcgatgaacatggcgcagcctacccggtatggcaggcactggaaacggaagccgggaggtatctgcaatgaaatacgccgggatgcctatgggaatgtgggtgctgttttcaggctcctttcaaaagcagctgaccgctgtgctgggctatgatgcagccaccgcaagagccatcacgaaaaaggcaaagccgcaataccggcagatcatccgcaggctaccggagtttgaaaaagcggaccgcttcaagatgaacatcgtcaactgcgcaatgctcggcgcgttcatcctctccatgccgcaacgtccggaggtggacaggctgacggattactacgcaaagtccatgatgacaaagcccatgcagtggttctgccgcaagagcggaaaaagcaagtttaccccaaaggatattgccgccatgaaggccaccgctgctctgaaagccgccgaccgcaacccctactcgtggaacatggaattttacgaataccctgacggcagcggctatgaaggacgctttaccaagtgcggcatctgtgtgctgatgaaggaactgggtctgtacgatctgacccctgccctgtgccatctggactacaccatgagcgaagcgggcgctgcgacgaactttgtgcggcagtacactctcgcctccggcggcccatactgcgactgcgggtataaaaagaagggcttcgtgaaagctggaacggaggcaggacgatgaaggaaacctatctctcccgtgatttccgggagactgtggcactgcgctttcccgcgcgggcaaaggaactgaacaccgctttcgatatacgcctgagtgcgttgctggctgaaaatgcgggtgcaagcaaggaaaagcaatatcacctcaagcggcagatattgccgggcatttcggcctacgagaccttgcagcgggtcatgccgaaagaggaggcactgcaaaccgttcacggctatgtggagcacttggcgagaacgagccacaaacagcttgccgccctgctgcacataccggggctttaccgccttgttcccggcgttttcgtcaaatccacccggagcgttttcggcccggcggcgggctttgccccaaaagaactgcagaccggtaacggcgtctggcgtgtggatatgatgaagtgtccctatcacgacacctgcgcagaatacggctgcccggagctgtgccgctgcttttgtgacagtgatgacatcagctataccgggctgcatccgaagctgatctgggagagaagcatgacgctagggcgcggaaatgaccactgcgatttttgcatgaaaaccataaaatagatgcacaggaagcgaagaaaatgaagaaagaagaaacaaagcgttttatctgctggtgcatcgcggctgcggtgtatgagaaaaagcactctgcgcacctcgcaggctgacagcgattgctgaattgtctgtgttttttgcagaaagtgcatccatagcttccggtgtgtatatatgctgaaggattacccgcctttccaagcaaatgattttgaatatctgcgggggaggatactgatcctcctcccggaaaatgacattttcaaaaaggaagatcagaaacggttcgcagatctgttccggaaactggatgcggagatccgcacagttccgggcggtcatgtgggctttatcgttcaggcggaacggtatcttgatttgatggaaacatttttgcagagaaatggaatttgacagttcacgtctgcgaatcagtaagaaaaagcgaatcttcaggaaaagagaatggctatgcataaatcactttttgatctttccatagaagaaacgacctcgactgaaatgcctcacaccgtgaaattttccaatgagacaggaactgggagtatgattatctgtccactgtttttgggtgcagagctgtattataacgatatgcaccttgcattctttgaggaagccacggcaccaatgcggaatgtcattgagatcaaccactgccgcgtggggcgttacgagtgcagttttggggcaaatagctgctgctatctggcagcaggggattttgcggtgtgtgcagcggcgcgcaaaaagtcgtcctcctgctttccgctgcggcactaccacggcatcaccatcctactggatctggatgcgatttcgccggaaatgcggaaacaaatggaatggtacggcgtagaccttgatgtcatacggcggtacatctgcacggaaaaccgctgctgtatcctgcggtcagaaccgaccattgcccatattttttcagagctttacacagcgcattctgtgccggacactggctatcttcggctgaaagtgctggagttgctgcatattctgacccggctgaaaaacagggaagatgtgcagcagacagagtatttcaatcagcatcaggtggagtgtgtgaagcaggctgcggctcttctcacgcaggaactgacagttcgccgtacaatcgaacagcttgcacaggaggtcggcctttcgcctacggcattaaaaagctgtttcaaaggcatttacggaagctcggtctatgcgtatcagaaagagtaccggctgcagctggcacagaagctactactcgaaaccgattgcacggttgctgaaatcgcccatcgggtcgggtacgaaaatccgaataagttttcttctgcatttcgggaagcagccggcatgacgcctacggagtatcggaagatgcgtccgattggatagattctgtcgatttggttcttgcgcagaaagtccggttccagtaaaatcagtatcgcgattagttgaaactaacgccgatattctgattttgtggaggaaattgataatgcgtttgatgaaaagaattctgagtgcagctgctgtgctagctctgtctgcttctcttctggttggctgcagcagcggcacggcgagctctgttcccgtttctgcaagttctgccgcagaaagcactgtttcttccgtagaagagaccgcctcttctgctgtggatgaaaacgaagctgccgctgcacagttgctgaacgacctaacgggcagctatcaggaactgtggccggtgattctggcggacgaatataagcagacatggctggatgattgtaccgctctcgtgggcgaggacaatgccgaagctgcttttgagaagctgtcctctatggtgacaggtgatgtttacggcgaagatgcagtcaaagcgtatgccaacggcggcggagcctatttctgcggctttaccaatagccttgcgatcttgaccttcgatggtgaaacttctaccatttccggcaccgataaggacggcaatgtgctgttctcccatacctatcactatattggcatggagcctgtgcgtgggctgtatgagtttcaaagcgatgatgccgattccggcgagttcacctacttcttccttgcgccggacaccagtgcggaaacttaccatattgagtttcgctatggttcggatgcagaagctctgagccagtacgatacaggcgaatatgcttactggctggcctccggcatttccaccgactgtgaccagacgatgatcgacaactgcattgagctgttctgcaccgaaaatctggcgggttaaaacgcagaatgtgctgtggagttgaaataccacagcacatttttgccgcaatctgatttgaaggaggtctttccgtgaaaaaacagtccgatctttcccggctgatgggctacgccgggaactaccgatatttcacctacgcttcgtgggtgctgtctgcggtcagtgcgctggtggcgctggtgccttttgtgtacatctggaagatcctgcgggatgtgttgaacgccgcgccggactatgcgcaggcggtgaacatcccccattacggctggatggcagtgctgtttgcggtgctggcttacctcatttacattgcggcactgatgtgctcccatctgtcggcgttccgggtggcgaccaatctgcggctggaggtttccgaacaccttgccacactgccgctgggctttacggagacgtttggcagcggtaagctgcgcaagatcatccacgagagtactggcgcagcggagacatttctcgcccatcagctgccggacaaatataatgcaatggcaacacccataggtctgttggttcttttgcttgtgttcgactggcggctgggtctgctgagtctcgttccggtggcactgggcttcgtcatcatgtccgccatgacaggaaggcggatggcagacaaaatgcggcaatacggtaatgcgttggaatcaatgtctaacgaggccgtggagtatgtccgcggcatcccggtagtcaagaccttcgggcaatccgtcttttcgttcaaaaaattcaaagcgaccattgatgagtacgaaaagtgggtcattgcctacaccaaagagctgcggatgccgatgatgctctatactgccgcaatcaacggtgtgtttgctttcttgattgtaggtgggcttctgttcacccggaacggtgtgacttcggaatttctgctgaacctgctgttctacatcatcattaccccggtaatctccctgaccctgacccgcatcatgtacatgagcgaaaatgaactcgttgtggcagatgcgttggctcgtgtggattcggttctggatgcggaacctgtgccagaaaacgatcatccgcggcatccgaaagatgcctctgtgtccctgaaggatgtgcatttcagctatgatggcaaaacggatgttatcaagggcgtttcgctgaaaattcagccgggtcagatggtggctttcgttggcccctccggcggcggcaaatccacactggcaaacctgatttgccggttctttgatgtgcagagcggcagcgtccgggtgggcggagcggatgtgcgggacatccccaaggaagagttgatggacaccatctcctttgtgttccagaacagccgcctgctcaagggcagcattctggacaacgtccggctgggcagagcgcaggccaccgaagccgaggtgctggcggcgctgaaagttgcacagtgcatggatatcgtggaaaagttcccggagggcatccataccgtcattggcacaaaaggcgtgtatctgtccggcggcgagcagcagcgcattgccattgcccgcgccatgctgaaaaatgcgcccatcctgctgcttgacgaggccaccgcttttgccgacccggacaatgaagcaaaggtgcaggcagcctttgctcagcttgccaagggcaaaaccgtgctgatgatcgcacaccgtctgtccaccgtagccaacgccgactgcatctatgtggtgcaggatgggcagattgtggaatccggcacaaaggacgaactgtgcgcgcagaacggcctgtttgcccggatgtggcaggactatcaggcctcggtgcagtggaaggtcgcaaaggaggggtaaggaatgatcgaaaaaattcaacacgccacagccagctccccggagggcgcaaaggggcttgtaaagggcgttctggcctgtgcgttccagaacatggcgttcatgctgcccaccgggctgctgtatcttctggtaaaagacctgctggcaggctctacgagtgagagaagtaccttttatctgctgggatgcgttgcctgctttgcactgattttactgaccacatggttccagtacaacggcacctattttaccacctataaagagagcggcacccgccgcctgacccttgcagagcggctgcggaagctgcctctgtcctttttcggcaagcgagaccttgccgacctgacaagcaccatcatggcggactgcgaggtactggaaaaggactgctcccacttcatccccggtctgttcggctccctcatttccacggtgctcattgccctgagcctgttcgcctttgagtggcggatggcactggcggctctgtgggtcattccggtatccgctgccatcgtggtgggcagctatcgggtacaggataaggtgcaggccaggaccatggcggcgaaaatggcctgtgcggacggtattcaggagtacatcgagactctccgggacctgaaagccagcaatgcggagcagcagtatctgtccggcctttccggcaaaattcgggcagtggaaaagcagtctattgtggcagagctggaaacagcgctgtttgtgtcctccgccggcatggtgctcaagctgggcattgcatcggtggcgctcaccggttcggtgctgctggtgcagggcagcatcgacgtactgaccctgtttctgttcctgatggcggcatcccggatgtacgaccccatgcagggggctttgcagaatctggcggcggtcatcgccatgcgtaccaatgtggggcggatgaatgagattctggacgctcccctgcagaccggcagcgagcagctgaccaatcagggctgcgatatcgtgttcgaccatgtgggctttgcctatgactccggtgaagcggtgctgcgggatgtctcctttaccgcaaagcagggggaggttacggcgctggtgggcccctccggcagcggcaagaccactgtttcccggctggcagcacggttctgggattaccagaagggcagtatcaccgtgggcggcatggatgtctcccgaatcgacccggaaaaactcatgagcctgtattccatcgtctttcaggatgtgaccctgtttgacaacacaatcctcgaaaacatccgtctggggcgcaaaggtgccaccgacgaggaggtccttacggcggcaaagctggcaaactgcgaggaatttgccgagaagctgccggacaagtggaacaccaatatcggcgagaatggctgcgctctttccggcggtgagcgtcagcgcatttccatcgcccgtgcttttctgaaggatgcgcccatcattctgctggacgaggccaccgcaagtctggatgttgagaacgaaacggcgattcaggaggctctgtcccgcctcatcaaaaacaagaccgttctcatcatcgctcaccggatgcgtaccgtggcaggtgcagacaaggttgttgtgctgaaggatggcatcgtagcggagcaaggcagaccggatgagctttatgctcggaacggattgtatgcgcacatggttgatttgcaatcagcaagtcagaattggacgatttaaagctataataagagaaagctgtttcaaaaggatgctctgtcatgggatagaacatcctttttgaataccgttcagccgaaatttgtacaggagtccatcataaaaatgacattcaggaaaaatgacattctataaacctattgcaataggatgaaaagtatggtatatacattatacgaaacattgctttgaaatgaacactctaccgtccattgatgcataaaagagaggtgcttgccatgaccgccgtgatctatgcccgctattcatcggataaccagcgcgaagaatccattgaaggccagattcgtgaatgcactgcctatgcggaaaagaatggcatcaccatcgtcaagcactacattgaccgtgccatctctgccaaaacggacaaccgcccggagtttcagcagatgataaaagacagcgacaaaaagctgtttgacattgtgctggtctggaagcttgaccgttttgcccggaaccgctacgacagtgcccggtacaagacccagctgaagaagaatggtgtcaagctcatgtctgccaccgagatcatctccgaggggccggagggcatcattctggaatcggtgctggaaggttatgccgagtattattccgctgaccttgccgagaaggtcgtgcgtggacagaccgagaacatcctgaaaggacgctgcaacggtggtcgtggaacctttggttacacgctggattcggaacggaagttccatattgaccctctcacctcgccttttgtgctggaatcgttcaagaagtacaatgaaggctccaccatgaaggagatccgggactggctgaacgaaaacggcatcaagaacccggtgggcggtgcgtttacctataacagcgtcgaacatatgctcaaaaaccggcggtacatcggagaactgaaattccgggatgtggtcgtaccggatgctatcccgcccatcattccgctggaactgtttgaggatgtgcaggagaaaatcgccaaaaacaagaaagcccctgcccgtagaaaggcagaggatgactacctgctcaccaccaagctgttctgcggctactgtggggcgttgatgtttggcgaaagcggcacgagccggacgggtgaagtccaccgctactataaatgtgccactgccaaaaagcacaagggctgcaagaaaaagaccgtccgtaaacagtggctggaagatctggtggtcaaccagacgatgcagcttgtcaaagacgatgccgccatggaatctatcatcgccaaggtgatggaactgcaaaacaaggagaacaccaacattcccctctatgagaaacagcttcgggatgctgaatctggtatccagaatatgctcaatgcgattcaggccggtatcctgaccagctccaccaaggagcggctggagcagctggaagaaaccaagcgtgagcttgaagcccgcattgcagaagagaagctggcaaagcccaaggtcacggaggagttcatccggttctggctgctgcggttccgtaaactggacatgagcctgaaagaccagcggcaggcgctggtggataccttcatcaatgcgatttatctgtacgatgataaggttttgataaccttcaactataaagaaggaacacagaccgtgacttttggagaagcgacggaagttgcatccgagggaaatggttcggatttggattgcattcctgcaccaaggactgctgcacaggttttgtgcagcagtcctttttatttattttatcgaatccatcttgcaaaagcggcacagtgccttataatagaggctgtaccccggtgtgcgcgggtacggttaggatgtataggataaaggaaaaaagtatgagttctcaaacgaatacgctgacggaaggccctctggccaagcagatctttctggtcagtctgccgctggcgctttccaacctgctgcaggtgctgttcaatatgtcggacgtggcggtggtggggcgctttgccgggtccacggcgctgggcgctgtgggctccaccagcacgctggtgaccctgttcaccggctttctcatcggcctgagcaacggcatcaatgtgctggtggcgcgtttttacggcgcgcgccatcccaaggacgtggaaaagaccgtccactcggcggccatcatcagcgccgttgccggtgtggtgctgctgctcatcggcctgctgggctcccctgccatgctgcggctgctgaacaccaaggaggatctgctgcccggcgcgattttgtatctgcgggtgtattttctgggtatgccggcgctggcgctgtacaacttcggcaacgcagtgttcagctccatcggcgacaccaaaaaaccgctgatgtatctgtccattgccggtgcactgaacattgggctgaacctgttctttgtcatcgtgtgcaatttgagcgtggtgggcgtggcgctggccagcgccatcagccagtgcgtttccgcgtttctgatcctgcgggcgctgacccgggtgcaggactgctacgcgctggacccgcacaaattacagctggacccggtgcaggccaagagcatccttgcgctgggcgtgcccgccggtttgcagaacgccatttttgccattgccaacctgttcattcaggcgggcgtcaactcctttgactctctgatggtcaagggcaacagcgccgccgccaacgcggatgggctgatctacgactgcatggcggccttctacatggcctgcgccagctttatgagccagaactacggcgcaggccggcctgaccgggtgaagaagagctacttcatcagtctgggctactccttcggcgtggggcttgtgctgggcgcggcgctgttcttctgcgggccggccttccttgcgctgttcaccaccgaaaccgccgttattgatgccggcatgaagcgcgtagccgtgatggcctttgcctactgcgtctccgcctttatggactgcaccatcgccgcctcccgcgggctgggcaagacggtggtacccaccgtcatcgtggtgctgggctcctgcgtattccgggtgatctgggtgtacaccatctttgcccacttccacaccatcccggcgctgtacctgctgtacccgtgcagctggatcctgaccgcactggcggagatcgcctatttcgccagctgctacaagcgcgcaatggcgattttccgcaagcctgcggcggcgtaagaggaaatatgatataaaaagggctgctgcacggtttgtgcagcagccctttatttatgcttttgtcagggggtcagagcgcagctcagatctccttcttcagggtctcgcccatgatgtagccataggtcagagcggcgtcgaagcccatgccgtactgcttggcgtccttctcctcgatggagccgcagacgtcgccggcagcgtacaggccggggatggccttcttgtcctcagtcaggacgtggcaatcggtgtcgatggccagacctgcggtggtcaggtagaaggtggggtcaacgcggatggcccacagaccgtcgcgggtctcgatgtaggggcagttgcggcggccgaactcatcgggctcgccagccagagcggcggcgttgttggcctcgatggcgtctgccagattgggcaggttcagctcctcagaggccttctccacgctgtcgtagtgcacagcctcgcccttctcgaacatggcaacgtaaccgttgaagccgtaggactcgctgtcgcgcagcttgacggcagaggactcgtcgaacacatagtagaaggtgtcgccgttgtccttgttcagctttgccttggccatggtgtagtggttatcggagacgatgttgccgatgttgtcgcccttgatgttgaccatgatgccgggggcagactggtggatgaaggccagctcaaacttgctcttgtagctggacaggaaggcgggcagagcgcggttttcgcactccacatagccgccggcgtcgatacccatctggatgccctcgccggtcatgctggaggcgcaattgaagaagaagtcggcgtagtcggggctgtacttcttcagcatttcggggttcttggcaaagccgccggaggcaaggcagaccgccttgccgcgcagggtatagcttgcgccgttttcgcccttggcgtggaagcccacaacacggccgctttcgtccttgatcaggtcggtgacgctggtggagtagatgatcttgcccttctcgtacttctccacgcgctgtgccatgaacatcatggcgtagcctgcgccgccctcgtagcagccgggtgccagatacggggtggaagcgccgtactgggtagcgctttcgtagttgcccatggtgttgaagccgatgccgatgcctgccatccagtccaccagatcaccggcgacggtgtactgcttggtcatgtagggcatttcaccgttgaagaactcggtgcggtggtacttttccatggtctgccagaagttcatcatgccctccagcgtgcccatggcagagctgcggaagctgccgtccacatcgtagttgtactgcagcttggagcctgcggtggcaacgccgccgtaggtcatggacatggagccgccggggatatcgcgcttctccaccagaatgacgctgtagccggcctccagcaggcggcaggcgcaggtcagaccggaggtgccggcacccatgatgacgacatcagcctcttcctcgatgacctcgttggaagcagcgatggtgacctccttggagaagtcgtccacgttatagccggccagctcgatggcctccttcacagctgccttgacagccatggaggtgatggaggagccgcgcaggttgggcacgttgacgctctggtgctcgacgatggcggcggggatgcgggagcaggcatagttgccgatgccgatggtctcctcgtgagacagcacctcacaggcagtgatcttgccgtcaaagaaggtggtggcaacgtgcacccagctttcgtgacccatcgccttggtgacgtacttgccgtctaccggggaggagggcttggtcacagcggaggaggcagcagaggaagctgcggaggaagcgggagcaccggtggtgctggaagcggagttgccgcaggcggtcagcagaccggcagcagctgcgcccatggtgcccacagcggcaccgcgcataaagttgcgacgagagatcttagccataaggttcgcctttctttttcttttctcttcttttttgcgtttttcctgttccttcgtgcattttgaacattgatacgattatagcaaagttttgccccggtgtgaaatacaaatttgtgccctgatttatcaaatctctttatagatcgttttccctttacggcctgtgcggaatcctgtataataaagatgaccagctttttacacaaggaggggcgtcgttctatgacgatttaccaattggagtgttttattgccgtagcagaggagctgaatttcagcgccgccgccgagcggctgttcaccacccagcccgccatcacctaccagatcaatgcgctggaaaaggagaccgggctgcacctgttcgagcgcaccacccgccgcaccaagctgaccgctgccgggcagtccttttatctggacatggtgcagatgaccagctttgggcggcaggcgctgaagaaggcgcaggatattcaggacgccgaccgctcccgcctgaccgtcgggctgcggcagctgttcgattacagcaccttttccagcattctggcccagttccagcaccagtttcccaacgcctgcgtagacgttgtgccgcaggacaaccgccgcccactggaacagctgcgctccgggcagctggatatcggctttttctacgccaccgagcactcccgcgaccgggacatctcctttacgcccctgttcgccctgggctaccatgtgctgatgaatcccaactctccccttgccgaccggcgggcgctgcatctggcagacctgaaggggcagagcgtggtgtcctccggcgcattcgacagctttctgtccgcctgtcaggggccatcgctggagcagctggcgcaggtgggggtggattgcagcaagatcacccccagctttgagggtgcgctgatcatgatccagatgggcactgccatgtccattgtgccctgcctttccacggcggtgatcccgggcatcgtcaaggtgccgctgctggattttcccccggtgacggtggagatcgccgccatgcgccacgcaccccggctggaggtacagtcctttatcgagatcgccaagcagaaatacgcccatcaccccgacccgctgcggatggaggcgctgatctgaggcgcagctgctactgttcaaaagtcccctatgacccatagagttttgaatagttactttttctgcgccaaaacacgcagaacgatgcgctttttgccccgactcttcaaaagtagccaaagttttgaagagtcgcaaacacaacgaaactacgttacttttgaatactattcaatataaaaaagtggtaataatgtccgactcttcaaaagtccccttatatcatagggcttcgccgcctgttctgaacagcagcactgccctgtaaaagcaaaagccggacagcccgcaggctgcccggctttttacttttctgcttttactgataatcgtggttgaggaacagggccttgatgaccaccacctcgtcatattcctcctgctccacctccacgtccgcgttcaaggatttcaggcgtgccttgactgcatccagtgcctcgggcacggtgacggcgcggccctcctccacggcgtccatcatctgcttgagcacgatggggtgggcgtaccagctttttaccgggaaagtgccgtgggggtagtgcttgacatactctgccatggctgcctcggccttttctgcacgcttcatgatggcgttgttgttattgtgggcggtgggcagcatattgtagctggaaaacaggaagatggcggcaaagccgaacagcgcaaagtacacgccgtagctgccggtgtggctgaacacggaatacagaccgtaggccgcagccgcaacgcccagcacaaagatggccagcgccacatagcggtacaccggcttgctttgcagctgcgcacgcttgcggcgctgggcagcgctcagctcggcggaaagctccggctttgcgtccagatactccttggcgcggcgcagcacggtaaggctgtgctgcgcgtcctcggaaagctccggcagcttgcgggcagccttttcggcagcctttttctccagcgcctgctctccggcggcgctgagcagatgcagctgcggctgctccttggcgagcacttccagcagggcgtccacgtcccgctcgtccttgaagttgcactgcttctgcttgccgccgtcgtactccaccacaagataggccatggaggcaaacacgcccttgccggaaaagccgccggagctcatagccacccgcttgaacacccgggtgatgctgccgtagggcagataatagcggcggtcgatgtaaaagctgttcaggtacagcgcctttttgcctacgccgcaggggccgatcttccggcaggcttttttgtctgcctccagctcctgcgggtcaagctttgccatgcccagctgtgcgggtttgaaaatcatgggtagttcccttctttgctttaaattctacgcccctattttcccacggggcgggggcaattgcaagccctgattttttcaaaaaacagcgcccgccgctgtacggtcaggcagcggcgggcgcaagttacttacggaaatatggagccgtcagttccttatgccttggaagtagagctcttcttggtagcatggaggaacagagccagcattgcgatggcaaagacgatgccgatggggtaagcaacggcggtgttgtaagccaccagcttgccgtccgcataggtgttgatcatcttgcccaggcactcgggagccagcacgaagtaggtgcaggacacagcgctcatgaaggttgcaggcacggcggtgatccagaagttcttcttctccttgaacaggtacatggaagcagcccacaggacgatcatagccagcgtctggttggtccagctgaagtaacgccagatgacggtgtagttgatgaagcccagtgcgttgccgatgccaaggaaagcaccaacgcccagcacggggacacacagcttcaggcggtttgcgtagctgtcctgatcgatcttgagccagtcggccaaggtcagacgagcggaacggaatgcagtatcaccagaggtgatggggcagataacgacaccgatcatagccagtgccacgccgacattacccatggtcttgaggcagacgtcgtagatagcagcagactgaccggcagccagagcctcggccagaccgaccatcttgccatcggtgatggtgtacagtgcgcagccggcagcagcccagatcagagcgatgatgccctcgctgaccattgcaccgtagaatacgaagtgaccctgcttctcactcttcatgcagcgagccatcagaggcgactgggtggagtggaaaccggagatagcaccacaggcaacggtgatgaacatgaagctccagatgggggtgttagagggatgcatattgctgaagtttgcccagatctcggggatggtgtaggcggggttggtaaagataccgaagataacgcccacagccatgatgatcaggcagatgccgaacacagggtagatcttaccgatgacggcatcaatggagataaaggttgcgatgaagtagtacaccagaatgatgatcagccagaacagggtggtggtcagcagaccggacataccgccgttcttgcacagggtaacaatcaggcctgcggggccgactgcgaacacggtaccgaccatgatcagcagcaccacagagaacacacgcatgatgttctgcatcacagggcccagatagcggccggtgacctcggcgatggaagcgccctcattgcgctcactcatcatgccggagaagtagtcatgtacgccgccggcaaagatggtgccgaaggtgatccacaggaacaccacgggaccccacagagcaccctgcagtgcaccaaagatggggcccagacctgcaatgttcagcagctggacgaggaacagcttccactggggcatcacaacgtagtcaacgccatcgttgatgcgcacagcaggagtttcgcggtcgtccggtccgaacgtgttgtccacgatcttaccatagacaaagtagcctacgatcagaagtgccagacacagtaagaaactaatcataccagaaacctccttttgaatttcagccgccgacagcttatgccatactgcggctatgaccgatctctggcttcatgttaacacctttttcataattgtgttaatattttttaggtatggttcctatatcaaaaagtatatggcagcttattttatttgtttgcgcaaacttttattttgtggcgataacacgttttaattcgtcgttttgtttcttaaaaattttctcccgggaacggtcaaacccgcccccgccaaactttgcgccgcctttttgtgcactttgcttaatcgtttgcgattttctccccaaaacgtggaatttgagacgaaaaaagagaaatccgccccctctcgtgaaaacgcaatgtcgggcagcccgcaggctgcccgacattgctctaattaattataaataattcttccgctgcaacaacgacgaccgccgccagcggcggaaacagggaggagttgttggggcagcggccagcaagacgtgcgtgccgcccaaggcacgatgcgaatgctgggtgccgcaacccggaagacgcagcgcgcatttcaaatcttcttccacccgctgtccttgatggtggcttccgcctgtttgtgcagcaactgcacaaacagctgctcctccggctgcaaaggctcccgctccgggtacaccagcacgtcccgcatctgctgcttctgcgccgggcaattatgcagcgccagatggtactgctccagcgcgcgctgcggcatgggggacgaccacatataggccgtgggcagattctgcaaaatggagaactggctgcaccgctcatacacatggatgcagcggttggggttcacctcccagcgggaaacagtgctctcctccccgggcagatgggtgtcgccgtgcagcacctcgatgtaatcgttcagctcgtccagctcgcgcacctgccgccgcgccagcgggctgtcctgactggtgagcagcaggtaggaaaactccatgataggctcctgccgcagaccgtggcgctggcagtagcgcagatagtagtcctcgtcctcggcggcatagcgcagcagtgctatgtggtagccctgccgcagcacaaaatccaaagcttcaatggcaccgctctcccggatatgcacccgcagctgctcgctgcgggctgcctgctgcaaaaaatccaccgccgcataggaggcgtaggtggcatgggtcagcaccacccgcagctcggcgcagctgcgctgctggtgcgcctcctgcttcagctcgtctacctgctgcagcacccgctgcgcctgccggatgaaccgcttgccctgctcggtggggatcatacccgtggaggagcgctcgaagatgcgcaacccgtattcctcttccagattcttcagcgccttgctcacattgggctgcgccgcgtacagctgctttgccgccgccgacaccgacccccatttcatgatggctaccagataccgcagttccgtaatattcatgaacccctccacgtggtttgcagtcgtaactgtattgtaacaatttctccgcgccgctgtcaagcgggggagaataaaccctctcagtccgctcccccttgcaccaaagcccacgggtgctatataataaggaaaaacacaaaggaggggctgtaccatgccggaataccgcgtgctgcgcattgacgagcagctgtacggctgcgaggagctgcccgccgggcagccggtgctgtgcgatgtgaccctgaccgatgccgccggggctgccagcattctgccctacccggacagggagctgacatgtcttggcatcgacgagggagacaccgtttgtctgctgccggacggcaccctgcacaagctgtaaggagtaattttatgcataatatctatttcacccgccacggcgagacggtatggaacgtggaaaataagatctgcggcatgaccgacagcccgttgaccgcccacgggcaggagcaggcgcggcagctgggcgcgcttgtccgggacagcggcctgcacatcgacgagatcttgtactctcccctctcccgcgccgccgacaccgcaaaggccattgccgccgctaccggtctgcccgcccgctgcgagccccgcctgcgggagcagtgctttggcaaatacgagggcacgccccgggacggtgcggagttccgcatctccaagacccactttgccgaccgctatgacggcggcgaaagcatgatgcagctggcacagcgcatctacaacctgctggacgagctgaaggcggacaccggcaagacctacctgctggtagcgcacaacggcattgcccgggtggtgcactcctatttttacgatatgaccaacgaggaatatgccgctgcgggcatcaagaactgccagctggtggaatacacctttgaataacaggaaagccgccggggtcccggcggctttcttgttatggtgcgtcaaccatgacggtaatggaatttctggtcttttgtcacaaacatatacacgctcaccgccagcgcggccagctcggcggcggtgacagccagccacacgccgtcaatgccccacagggcgggcagcaggagcagcgcggcaagctggaacaccagcgtgcgcagaaaggagatgagggcgctggtcacgccgtcccccagcgctgtgaagaaggaggacgcatacacgttgaagcccatgatgaggaagctcagcgcatacagccggaaggcgcggctggtcagcgccagcagctgagcatcgtagcccacaaagatgcgcgccacatagggaatgagcaccatggatacggcggtcatgctcacagctaccacggcgatgaggcgcaggctcttttggtagaggttatgcacctcggcgtggttgcgcgcgccgtaatggaagctgacgatgggtgcgctgcccacggcatagcccacgaacacggccacaaacaggaaggcagcgtacatgataacgccgtaagccgccacgccgttttctccggcaagccgcagcagctggaagttatacaggatattgaccagcgacatggaaaggttggtcatcagctcggaagagccgttgatgcaggcatcccacagcacgcggccgtaaaactgcgttctgcacaggtgcaggcggctggtattgtggtggtcgataaaatagaacaccggcagcacgccgcccaccaattggctgatgagggttgcaacggcagcgccctccacgccccagtgcagcatacccaccatcaccacgtccagcaccatgttggtgcagcctgcacctacggtgaaccagaagcccagaagcggcttttcggcggtgacgaaaaagctttggaacatattttgcagcgcaaagggcggcagcgccagcatcaggatgcgcccgtagcgcacggcgtagtccagcagctctccctttgcgcccagcagcacggcgaccggccgcaggaacacaaagcccagcacggccagcacactgaccgagatgagcgctgcccacataaacatggaaaaatagcggtcggcttttttctggtcaccctcgcccagcgtgatgcctacgatggcgctgccgccggtgcccagcataaagccgacagtgcccagcagctgcggcagcggcatgatgaggttgaccgccgcaaaggccgttttgcccacaaagttggagacgcacaggccgtccacgatgccgtagacggaggtgaacagcatggtgccgatgcagggcagcacgaaccgcagcaggcgggaataggtaaaatgatcggacaattggatggctttctttgacatagatcctctttttattatagcataaagtgtgtgctgttcaagtttcttcatgctccgctgcaaggcggacaaagggcgcgatggcgttggcatcgccgtggcggacgatggagtaggtgatatcgcaatagggctggatggcagtgctcttttccacggtggagatgagcagcacctgcaattgcaggcggcggaacagttccatcatggggcggatgcggtcgctggtcatcttgctgaaggcttcgtccagcagcaccagacggatgctgttttcgctcttctggtaaatttgcaaaaggcttgcgcagatggccacatagaagggtgcctgattctcgccgccggaggaatcgcggctgacgcgggaaagatacgcctgctgcccggtgacctgattggtcaccttgatatcgtagtccagataggtgcggtagtccacatagtccgaaagggtggcaccggcggcggtgcgtccctcctgccgggcgcgggtgttctcgtccacatccgccatgatcttttccatcagctcgtccacctgacgctcgtaggcggggtcagcggtggcggcaaggttatccagagagtcgccttcggtcatctgctggttgcccttgtccacgatgacctgatagaacgccgccagctgcgggtcgcggctgggctccagctcaaagcggtagacttcctcgccgtaggtcagctgctccatgaccttgttcagctcccggaactgccgccgggcgttgaagatatcgtccttcatgcggaacaggatatccttgcggaagcggtccttgcagtcccgctgcgcctgctccaagcgggcggcgtagcgctccaaatcgatgcgcacaaggctctcgtgctgggcgcggtactgttccagcccggcaagccccagaggataatcgcagacgtagcgccggttgtattcccgctgcgccggttccagcgtgctgttcaggtagacagtcagggcatcgtccagcttggcctgtgccttttcggcagcctgcgcggcggcgcggggggacttgtccggcccggtcagcgcctgctgacggctgcgggagagcggctccaccagcggatgggcggcaaaaaagctctcggcggcctgtgcgctcttttcggcggtgtccaccgccttttgctgctccgtctcgcaggaggagatctgtttttcgcacacgcgcaggtcgccgccggtctgctccacggcagtgcgggcggcttcccatgcggcttcgcgcacctcttcctctttatacagctgctgcaaaagcggattctcgcggcactcggccagctttgcggcctgcttgtccaccgccgcgcgggcggcggtcagggcggcgcgggcatcccacaaagcggcaagttcttccagcgtggtgccgcgcaaaagggtctggtactggctgtatgcggctttcaggttctgctccgcctgtgcggcggcgcgtacttcttcagcaagggcgttcatctcccctgccagtgccccggcgcgggcgcggcgggcttccaagccgatatagcgctgcggggtgcgcagacgctccaaccggaaggggtggtggcgcagaaggtcccgggtggcgctgtcggggtagttttccagcgtgtcgggggtgtcacagcagacgatgcggcgcaggatggtgtcggcgtactgcgcggccagcgggttttcactggtgacctgtgccgccagactgtcggcgggggcggtgtcggcgcggcggttggccttgcgcagacccggggtgtccagcaggctgatggggcctaccttgtccttcagcgccacaaaagcgctctttgcggcggcgtagtgggcgggcggcacaaggatatcgaaccggcggtcgcccagacaggcctccacgcagtcctgccagctttcgtcctccacgttcagcagctcgcagaagatgcgggcgtccggctccatgccacggcttttcagctcggcattcacggcgtcccgcacccgggtggcggcgtccccgtgggggtacacccacttgccgccggatacggcatccagctcggcgcgtttctcggtctgctgccgctgcaaggcggcggtgtgctgccgggcggcaaaataggcttcttccagcggcttttcctgtgcggtcagccagtcggtcagggcgggcagggtgtccggggtcaggtctgccagcttctgcccggcggcaaaaccgctgcggcgcagcacagccagcagattaccggtcttttcggcggctttttcggcggtatcggcgcggcgggcggcggcatccagtgcggtctgccggtgcgccagctcctcgctgagggcgtccagtgcgcgcccctcgccgctggcaccggcggcgctgtgggcggtcaggtaggcgcggcgggcttccgcttcggcggtcttgacctcggcgtagcaggtgcgcagcgtctcctgctggcggcgtccggcgtccacccgctcctgccagacggccttttccccggcatcggcagcagcccgcgccagcagggcggcgccccggttcacaagggcttcggtctgtttttcggtggcttcacggccaaaacggacgatctcgtccagcgcatcggcgcgggtctgggcttcggccagcacggcgtgcaggttttccagctccaagcggtcgccctgcaaggcttccaagtccagttccggctggggcaggatatactggtacagaaactcccggaaattcgggatctcgtccatgctggtgcccatctggaacacctcgttgaactttttgcccagcgggctggctgcgcgcccgatgcccagtgcgcggcaaatgcggtcccgcgcctcgctgggactgcgggtgtaggaaagccgcccctcggcgggcttgaagtcctccttggcgctgggcgcaccagtgcgcgggtcgataaagggcagctgttccagcgtgatgccgtcctccgagatataccacgtctggtcgccggggtgcagctcctgcatggggccttcggactccacccgtaccgcgatgacaaagctggtgtgctttacgctatcccagaactccgccccgatataggccacggtgtgccccgggcggcggtaggcgttttcgccgcgctgcttggcgtggacagagccttgcagggtgcgtccgcttttcttattgcccagcgcattgaaattgcggttggtggtcaggcaatagcggatggcgtccaaaatggtggtcttgcccacggcgttcacgccgatcatataggtcaggcgggcgcagtcgaaggtggtattttcaaagttgtgccagttgataagtttcaggcgtttgagttcgatcatgcttcaccctcccctgcttcggtgtctgcgccctccgggcgctcgtacaggccaagctcggtgcgggtgcgggcgctctcggcggcggcatccgcaaggtcagcgtccggcagcgccagcagcaccgtggggaacacctcgatgcggctgtccagcccggacagccgtcccaccggacgcgccagattgtaccggcgcagggtgcgcatgagtttttccagcgtttgctgatccagcttgcggggcaggttcattttttgcaattcggcctgtacttcttctacggtcaccagcacctcgtccgcgctggcggcaaggctttcccgcttttgcaggtacaaaagccgcagcaccagcagcaaaatgctctcgtacttgagcagccgtgcctgactgccctcgtgctcgttgaccagcgccgccgcctgcatgggtgcggggtacaaaagcaccgcgtagcccagcggtttgaacaccgcccgcacctcgttgaggtgatcctgaatatatagatattttgcccgctgttcctctacgcagcccagcacaaagcagtggttgagcagatagtttgcggtctcttccagcagatcaatggttgccatccgtgtttacctccttgcggcgggtcaggacaaaatcctgaaaccggaagccgccgcgctccacccagtttccggtcatggtgatatcatactcccggtgcggcgactgggaataggtgtgcaggccgatgatgcctgtaaaatcgttcgggtattcctccacaagggtggaggcgttcacctgcccgcgggcagccagtgcctgccgcgccagcagcgccacgttttcctcggtgacggcaaggcgggcgtagtccagcagaagctgctgctcctgccgcagccgttcggggtcaaggagctcggtgcgcaccggggcaaggggcgcttcggtgcggggcgcggcggggggatacagcggctttgcgccgaacactgccgccgggtacaggtgcagccgcgctgccaccgggccgtcgtccggctcgaacagctgctccgggctgcggatctcctccgcatagcggcgcagcagggcggtgacgctgccctgcgccgagcggtcgctgagcagcaggaattgtgcccgctgcaccgcccgcttgcggtagcggatgtggctggcgtcgatctccttcatcagggtgctcatctcttccagcgcgtcccgctgctgctggataagagcacgcacccggggcgccgcctcgccgggagcgcagcgctccacccgggcgtaatccagcgctaagcgcggcagctggttctgctcgcagtcgtccagttcttcttccagataggcgcgataattgaacaggttatcgcttgttttaaagcgatggtacgccgccgccaccaccttttcctcgtactggtcgaacagttccagcacctcctgcggggtgcggttatgggtcaggcggtcgatataatgcccgatggaagcgttgagggcgcgcagggacttgttcaaagtttcaaggtctgccgccacctcccgcagcacgttctcgtaggggcttttttcctgtccgatgctgcccagcagctgccacgccttatacagcttgccggtgtaggtgaccacccgggggttcagtatttcctccagcgcgtccagcagcggggtgacctccggcataaaggcaagggtcggctcgctttcgtagctgccgggctgctcttccagccagccggtgcggcgcagacgcagcaaaaagcccaccgccagcgtgtgggggtcgcgggtgggctgctcgtcctcatcgcccgcgccgtcggcgtccagcgccagcggctttgccagcgcggcaaaataatcctcggcgcgggagacggcctcggcgcgggaaatgctgtaatctgccgtatggcggcactcctcccagagcagcagcaaaagctctgcataaaacgcccggttgggccccgccagcgggcggaacagccgtgggctgaccagttcaaacagctgcatggaaacgtcctttctgtgtaagttcgatacccttttattgtaccacagcgggcggggtttgtcacaaaaaggcgaaaaaaagcccgccgggcaaggcgggacgatttggaatgcgcgccgcgtgcgctttgcgcataaacagcggaagaattatttttattttcgggatagcggagcgtctgcggacgctccgctatcccattttcacgggaggggttcacgcaaaaaaacccggggagcggggtgctcctcggggcgggatggggttcagttctacggggtggtgttggtcagctcaaagccgatggcaacataggtcttgccgccaatggtccatgcgccgacacccagcgcggtaagctccagcgttatgccgtttttctttgcgttggcaatctcctcgttcacggtgcggagcagagctcgaacattggtagagttcgctttgatggctgcggttttggcggcttcgtagaaaagcggcacataaccttttccggtgtcttttttcagttcccagcaaagcatcacctgccgcaccacggtctttccgtcgccctttgttttccagagcgtctcaccggtcaggctgtccgcgccgtgtttctcctcgatgtgctcgatggccagcctcttgatgtcggcatcgttttcaaagctcgtcccgaatgtcttattcagcgcgtcaagataggcgctttccaccttgggatcaaactcggggttgccggggtcgctgtcgctgcaggcggtgaacagtgccagtgccatgataccggccagcagaacagccgcaagacgctttaactttttcatgcaatgctccttttataaaatgcaggggcccatgcggatgcacagggcattctgttttcattttacagcagcgcggcagggttcgtcaatggcaagtgtgcctgttttttgccgggatttttgggcagagcgcaaaaaagccccgggcggggcaggacgatttggaatgcgcgccgcgtgcgctttgcgcatattcagcggaagaattatttttatttcgcgtttgtcgcgctctgcggagcgctccaaacgcattttcacgggaggggtcgtaaaggcaaacggcatttgccacggtcaaaacaaaaagccccggagggcgggtgctctccggggaagaaagaactgatgattctttacttatttgccgtagctggggttcaggatctggaatgcaacagccagataggtcttattgccgtcagccttgacaactacacaaacatgagaccaagcaccattagccttcacattcacgtcggcaccgggaaccttttgtcccacttccttggcgataaagtccagcaggttgagcatgattttaccatactcgtatttcgttgttgcagtgacagtcaggtatttatctttctgaccatccacatggacatttgccatgaatgttgcgcccaaaatgctgagctttgcgtcagcgatatcctgattcaggatctccatagtctttttgcggagcgtgttatcattctcgcttgcagtcatcacgccctgcttcttgagagacccgatcatcgcgttctcttttgccgttgtttcagcagtgccgccaccgccaccggaacaggcagtgagcatcaccatagccattgcgcctgcaagcagcagagcgacgatctttgacagtttcttcataggggtatccctccaatcagcgttttttgtggatatgtttcttttttctcgaaaggctttcgcaaccatcgttgcctttctgccctgattatatccgacgcctgacggttttgtcaatcgggaatatcgctaaacttcctgaagcagtttcgtgaaaatgatgaaaataagcgggatttgttgcagttctgatatattccggaataaagtctgtctacaattcacagaatcatcttttctctgctccggcggcgcggttttgccgggtgcgggagcacttaaatttggacatatgttgtgtttcaggcgttaactttcttgaaaagggttcgccctctcaggcgctcccgcgccagctctcccaaagggagagccaagccgtaaagttcagcgctaaagtattaggcgcaaagagaaacttctcggcagtggacttggctctccctttgggagagctggcaaagccgcaggctttgactgagagggcgagccactttctccattattttgcctttttacacattttcaccacgttttagtggtaaaatcatgtccagattgaaacgaacttggaggaagtacccatgcaacactgtcccgcccgcgcggcacagcggctggcggcggcagttctggcgctggttttgctgctgtgcgcctttttgccccatgcccacgccgccgagctgaaagagaaaaacggcatccggctgctcagcttcgacaccagccacattctttccatcggcaaccagacctccggcaagtgcagcctgtacgcgctgcgctacgcccgcaccattctggacggcaaggtgtgctccggcagcgggatgtggtcgaacggtgcggtgtggtccgccgcaggctacaccgggtactccggcacccgcgccgagtgcctgaaaaagctgtacagcgagctttccgccgggcgtccggtgatcgtgcacctgaaaaataccacggtcagcggggtaaagcgccacacgaaccgcacctctacttatgaataccacctgacttcctccggctggagcgaggtgaactacccccacattgccaccagcagcacctacgggcactgggtgtgcgtggcgggcatctcccccaccgccgacccggaaaacctgaccgagagcgacttctacgccctcgaccccgcccgggtaacggcaaatggacggcttgccgtcacccgtctgctggatcataccctgtgggtggaaaactcccccctcaaggtgctggggtgaaaatataatatgataaaacagagcgcctgacactgcggtgtcaggcgctctgtttctattcagttccttaatatcccttcaccgagaagccgcgctcccacgggtcgggcgggatattcttgctgcggatgccggtaatttggatatagtcgcttttctggatcatggcaaacagggagatgaatttatccgggtcgccctgcacctccagcgtcacgctgccatcgtcctcgttctgcacccagccggtcaggtcaagggtctgcgcggcgtaccgcgcccggtagcggaaacctaccccctgcacctgcccggtgatgatgtagcgccgccgcaccgtgccctgtggcagcgcgggcggggtgcgatcctttttggaaagaaaatcaaacacggcagtgtccctttacagctcctgataagcggtcatcagggcgggaatgaactgctttttgcggctcaccacgcccggcagcgtccagctggcatcggcggcgggctgggtgtcgaagccatccgtcagcacctcggcggcgtagcgcccattgcagatgaccacgctctcctccttgggcacgtctgtcagcagcatatagatatcctccacgttctgcttgttgcgtgcttcctcgagatagggcttcagcagcgcctcggcggcggtcaggttcttgcgggtcatatagctgccctgcgccacaccaaagcggatatcaccgcacatgaacaccttgaagtcctgcaaaaagacctcctcggcggtcttgccgtccagcttttcgccggcttcaaacatctcgttggcaaactcgttgatgtccaccccggcgatctttgccagacggttggcggcgtttacgtcgatgggggtgcaggtggggctgcggaacaccagcgtatccgaaaggatggcagccagcagcagaccggcggtcttttgcgggatggtcacgccgttttcatcgtacatctgggtgacgatggtggcggtgcagcccaccggctggttgcggaagtacaccgggccgctggtctccagactgccgatgcggtggtggtcgatgatctccaggatctcggcctggtcaaagccctccaccgcctgtgtggcctcgttgtggtccaccagaatgatgcggcgcttgcgcaggttgatgatgttgcggcggctgatcataccgcagtacttgccgtctgcatccagaatggggaaataccggtgacgcacctttgccatcacgcgggtgacgtctgccaccggggtgacgagggtgaatttcatgatatcgtcccgggtcatgtaataggagatgggcgcgcactggctgatgagctttgccgccgcgtaggtatcgcagggggcgctcatgatggctacgccggtctcggcggcaatgtgctggatggtgcggcccacctttgcgccgttgcagatgatgatgagagaagcttccttctcgatggcgcaaagctggctttcgtagcggttggtcaggatgacgatatcacccttttccatgctgctttccagcatttccggggtggctgtgccgatgcggatgtggccggtggtgcactctgcgtcctcgctgcccaccaccatggtagcgcccagtgtttccagaatattgcggtagctggtgcggctcttggcaaggatgccggtgtcgaacaggtccatgttggcggtggcgatatccttcaccgtgatgacgccctgcaattcgtcatcctcgctggtcacggggagggtgtcgatcttctggtcgcgcatgatctcccacgccttgcgcaggctggtggagccggggatgccgggcacctgccggtaatccacgtcccgaattttagggttgacatcggtgcacatccggggcggcgtgaccccgaactttttcagcacaaattccgtttcctgattcatcttgcccgcacgccgggcttcgcagaccagatcgctggtcttgtttttcagctctgcataggcaatggcagagcagatggagtcggtgtccgggttgcgatgcccgatgacaacgaccttatgcgcagtttgctgcatactgtacccccttatgggtctttaccttcttatcataccttatccatttatcaaagcagcgcccctctcctgcacagcggggcgggctgcaaccttattttaacacaactgcgcccatgggtaaagggcactgcacacggcagactgttgctttttgacactttcttgtatacaacctcttgcatttcgacagcttccgctgtatgatagaagcattcgagcttttttgtcatttgcaacggaggacagcatgaaatcgtccaaattcacatccactcccctgtttccacggcaggcgctggtggcgctgctgctgccgctgatcgcggagcaggcgttaagcgtgaccatcggtctggcggacactttgatggtatcctcggtgggcgaagccgccgtgtccggcgtgagccttgtggacagcttcaacaccctgatgatccagatcatgagcgcactggccaccggcggcgcggtggtcaccagccagtacatcggccatcaggagccgaaaaacgccaaggcggcggctgcgcagatcctgttcgtgctgtccagtttcagtgtgctggtggcggcagtggtcatcggcgggcggcacgccatcctgcggggcatcttcggctccattgatgcggacgtgatgcgctacgccgagacctactttctgctttcggcgctgagctaccccttcattggcctgtacaacgccggtgcggcgctgttccgggcccagggcaacagcaagatcagcatgctgtccagtctggtgatgaacgtggtgaacatcggcggcaacgcggtgctgatctacggcttcggcatgggggtcatgggcgcggcgctggcaagccttgtgtcccgcgccattgcctgcgcagtggtgctgtatctgctgcaaaagccgggctgcgccctgcgggtggacagcctgcgggcgatggcgccgaacggcgggctgatccggcgcatcctgcgggtaggcatccccgccggtatcgagaacggcatgttccagatcggcaagctgtcggtctccagcctgacctccacccttggcacggcagccattgccgccaacgcggtggccaataccaccaccaccttcctgaacatccccgccaacgccgtgggcatggctgccctgaccgtggtgggccaatgtctgggcgcgggcgaaaaggagcaggcggtgtactactcccgccgcctgatgctgaccgcctactgcggcgcgtgggtgatgaacctttcggccttcttctttgccaaccggttcgcggtgtccctgttcaacctctcgccggaggcgcaggccatggcgctggacatcatggtgtggttcaacatcgtttccctgttcgtgtggccgtccagctttaccctgcccaacatcctgcgcgctgccggtgatgcccggtttaccatgaccgtgagcatcgtgtccatgtgggcgttccgggtgggcttctgctatctggccgtgctctgcttcggcggcggattgctgagcatctggatggggatgtatctggactgggtgttccgctcgctgtgcttctacctgcgcttccgccggggcagctggctggagcagagtgtgatctgaatttttggcatccacccctttaccgatccttacagaccggtgaaggggtggatttttctttttttgcaggaaaccgccgctttgattcgtattatcagtagcagaacgatggtattttttacaagttccacaaattattttttcagcgcttgacaaagttttcacctttcgttcttgcaatcttcatcgttcgggcgtataatttctcaatgctatcgagttctgctcttctgcaaaaggaggctattctatgaaacgcagctggcttgcgcgccaccccatcgggttcatggcgctgtatacgatattttatctttccgtttttcactctctggaggcaaacgtccccctgcgcagcattctggtgcactgccgtctggacgatctgatccccttctgcaaatatgcggtgatcccctactttgcatggtttttgtggatccccttcaccctgttctatctgctgtggaaggccccgcgggaggacttctggcggctgtgcctgccgttgttctccggcatgaccattgcactggcgtgctacgcggtgctgcccacggcgctggacctgcgcccctactgggtgccgggcagcgatatctttgcgcagactgtgcgctttttgtaccgtaccgacaccgccaccaacgtctgcccgtccattcatgtgttcaactcggtgacgctgctgctggcgtactaccgcagccgcatttttgatgcgccccaccgccgctggatgcgtcccgcagccgccgtgctgtgcatttccatcgtctgctccaccgtgctgctcaagcagcacagctgcattgacgtagccttgggtgcgctgctggcactggcgctggacagcgcctttaccgccctcgagcgcagccagctgccgcaggtgcggagagcctaaggaagaaagaaaaagcgacccctgtcagcgcctttggcgctggcaggggtcgttttttcatttcctttttcagaacagcccctcgggcaggcagatatcctgcttggggacttttgtccacgcaaagtccggcacaaggctttccggggtgcggggcgcaggctccggctgcaagccgtaggcaaacgccagcttgccgatgatctccggggcggtatattttgcccgcaggttttcaaggctctggtcgccgtcccgcttggacagccgccgcccgtccgctgccagcagcagcgggcagtgggcaaagcggggcgcttgtaagcccagcagccggtacaggtacagctgccgcgccgtggaggaaagcaggtctgccccgcgcaccacctcggtaacgcccatgcgggcatcgtccaccaccaccgccagctgataggcaaacaccccatctgcccggcgcaggtagaaatcgccgcagtcccgcagcaggttttccgtgtgggtgcccatgcagccgtccgtaaaggtgatctcctcgtccggcaccatcaggcggtaggcaggggctttctttttgcgcttttccgcgatctcttccggcgtcagtccccggcaggtgcccgggtagatgacgttgccgtccgaggtgtggggtgcgctggcggcgtgcagctgggagcgggagcaaaagcaagggtacaccagccccctctgctccagtttgcggtagctttgggtatagatgtccccgcattcactctggtaatagggcgcgtgtgcgccgccggtgctgccgccctcgtcccatgtaagccccagccatgcaaggtcctgctccagcaagtcggcgtagacgcgggggcagcgctcggcatccaggtcctcaatacgcagcacgatgcgcccgccctgactttttgcgctgagccacgccagcaggctgcacgccagattgcccagatgcagccgtccgctggggctgggcgcaaagcgcccggtgaccgggcggttttgggatacagggacttggttttgcatgggtgtgcttcctttcgcttttactggttttttctcattataagcccttgctgtgcaaaggtcaatgcgcataaaaaagccgccgcaggcggcaatgcctgcggcggctgtaaggtcggctgctcagtgcagctccggccagtagcccttgttggcttcgatcatatcgtccagaatggccttggcaacgctcatgctgggcacagtcttgttcagggtgaaggcctgcagcaccttctcgtagctgccttccacgcagccctccaccagcagcttttcgctgttgagctgctgcatcatcaagccctgctggaacagcgggatgttgtcccgggcaatgacctccgggccgtttttgccgatgtaggcgggcagctccaccattgcgtcatagggcatattggggatcgcgccgcggttctcggtgatgatgaggaagcgtgccttggtgtcgttcttcagcgcagcggaaagatctgcgatccagtcgccgtggctgccggcatagaaggtgttggcgtccacctcgccggtcttgaggtagtggtcgatgccgtcgaacaggttcttttcgcgggtctcctccacctcgttggcgcgggtgtggttcgggtccgagtgctccacgaactccttggcctgcagatagtagttcaggtaggtgttgggcaggtactccgggaagttttccatgatctcgtactcgcccttccacacatagtaccagctgcccttggtgtggcggttctggctgctggaggaggtcagcgcgcccatgcccttgaggtagctttccggcagaaggatttggttctccttgatgtaggcgcgcagcttgggcatcagatcctcgccgtggtactggatggaggtgaaccagccgaagtggttcaggccaaagtaatcgtagacgatctccttcttgttctggatgcccatggcagctgccaccacgtcaatgatggcgatgggcatatcgcagatgttgatgatccgtgccttcgggcgcagcttgcggcaggcttcggatacgatggcggcggggttggagtagttcaggatccagtagtccttcttggcatacttttccacatcgtcgatcagcttgatcatggggaagatggtgcgcattccgtaggccatgccgccgcagccgcaggtctcctgtcccacgcagccgtggcgcagagggatcttttcgtcctgctcccgcatggcgtagccgcccacgcgcatctgggcaaacacaaaagaggcatccgtgtaagcctgctgcacatcggtggtaaccaccagcttgatgtcggtattcagctccttgtgcaggacccagtccaccacaacggcaaccttgtcctgccgctccttgttgatatcgaacagacggatctcgtccacttccagttcttcccggcgcagggcgatggatttgacgataccggcggtaaaagtactaccgccgccagcaatggtaatgaccataatataaacgctccttttttgtatttttcaggttagcccggcgcaatccgccgggacacggtaaaacgatttactggttttccagctgtgcctccacggcacgcttgatatcggccacctgcagaccgtaaacgatctggatatcggtaccctttttcacgatgccgctgttcggcagtttgttgatggcagcttcgtccagctttgcggggtccttgatgtttacccgcagacgggtgaagcagttgtccaccgacaggatgttctccttgccgcccagaccgtcgatgacgcactgcacctcggcagcgttcttcacgcttgccttcttggcgggtgcatcgctccccgcggtctcagtgctcacctcttcccggccgggggtgtgcaggttgaaggccttgatcagcagggtgaacaccacaaagtacactgcgatctggcacagcgccagcaggtacagggtgggatagttggtcttatctgcaccggcggaaaggttcatcagcaccgagccgaggaggttggtggtaaagccggtgacatggaagatgtgcagcagcacgatgaacaggccggagatgcaggcgtgtgccacccacaggatgggagcagtgaagcagaacataaagtccagcggctcggtgatggaggccagagaggcggtaaaggccagcggcaccagaacggcagcggtctttttgcggttctccttgcgggcgcagaagatgaaggccgccacgatgccaaagtagccgaaggtcttggtgaagccggtgtacatccacacgatgccgtccgagaagggcagacccatgctgtactccatcatcatgacgatgtaggagccggtgtaggtggcatcgcccacggtcaggctgttgcccagtgcagagaactggaagggggtgtagatgaggtggtgcaggccggtggggatgaggaagcgctccaagaagccgtacaggaacagaccgaagttgccggaggtggcgatcaggtcggtcagtgcgctgatgacgttctgcaccggcggccagaagaagcaggaaccaaagccgaacaggatggaaaagaccaccatgcaggtaaaggaccagcggttgccggagtagatctgggtgatgatgcccttgaactgcttttcacaggtgcggttgtacacccagccgcagacaagacccagcaggatgccgccgaacacgcccatgtccaccgtctggatgccgaacacggtggactgaccggtgccgtacagacccaccatcgggtcagcctcggccagcatacccagctgggtcagggtgacgttgccggcggtcaggtacataaagtagctcatcaggccgatgatggcagcctgctgcttgttctttttggccagcgccgctgcgatgcccacgcagaacatcaggctgaggttattgatgatgaccatgatgcagttgtagatcagctgtcccagcagcttgatgggggtccactgcagaacggggatcatcgcactaaggcttgtgctggtaagcaatgcgcccagcacaaggatcaggcctgctgccgagatatacgacagcggtgagagcatggctttggagaacttttccaagccattcatgactttttctttcatcgtgtaatactcctcactttttgacttgactgtttttggggatgatttctattccgcagggcttccggacgccctgttgaagcattttatcctacgatcttggtcaggtggatgagcagatagacctgctcctgatgatccagctcgtaatcaaattcctgccgcagataggcattgatgcgctgtaagcacacctcgttgcggctgtcgcgctgcaaaagcaccgtgtacatggactccagcccagcgtcctgccaaggagtgtgccgcaggatgcgcgccgccagaaacttgaggtgcacggtcaggcgggtggtctcaaggctttcttcctcaaaggtgcagtgataggtatcgcagatgatctccttgaccgccttgacgaactttacggtatcgtaggccagtgcaccgtccgccgcaccggctaccagatgcagggcaatgtagcccgcttcgtcctccggcagctgtacgccgcagaactgccggacaagttccagcgccctttgccccactgcgtactccttcgggtacaacatccgggtctccgagagcatgaggttgggcagaaaggtgcccttttccacacgttccagcgcaaaactgatgtggtccaccagcgagatggtgcttttgctgctgagcaggatgccctgctcctctgccgccagcgagatgcgctcggcggcctgcatcacctgcggagtaacgttatccagcatcttgaggaacttggtctgcagctcgttctgcacatagtacaccttggaaacgcggcttttgtcgattacgtcccccgggcggcggccaaacccaagcccgttgcccacgagaatggcttccctgccgtccggcatgaccaccgacaccgcattgttattgaatacctttacagcctgcatcgccgcactcctccgcttccatgccgcagcttttataaaaagaaaagggcacaagaaccaaagggatgccgttgccgccttccctctgatgctcatgcctgatcgaacagttacacgcactgataaattcacttgtctgcttttgattatacgagccagcgcggagaatgtcaatgcgtggaactgcccgaaattcaagctgcatttttgtatatcctgcacaggtctgcttgaaattcgtcctgcgcagaacgattgacaacgccgtgcgcagaacgtatacttagggtgtagatcccgctttgctccggcggcttgccggggcaccagttacggaggtttttcttatgacatcgaaatatatccgcccccttgcgctgctgctgtgcgccgctttcctgggctgtctgctggcagcctgcggcggctctgcaagcagccccgcatccagcgctgcacccgcctcggacagcgcatccgcttccggcagcagtgagctgccctcctccaccacagaagccaacaccggggagctgaaccccggcaactttgacgagaactcggtgttctccatcaccggcacatccaacgcctttgcgccctgtctgggctgggggcccggggtatccggctgctccttgaaatcggtcatcgcggcggcatcgctgctgcactgggccgaggacgcacggatgtccagccgctccccggaggccattcaggatgccttttacagctggtacgacggcctgaccgacaaccagcaggagggctttgccgaggcatggccgctggtcaaggacgccgcgctggacctgctcagcgacaaggacagcatgaccggccgcatcgcggacgcagggctggacgctgacaccctgcccggctgcaccctgaaaaactggcaggcgctgcaaagcgtgctggacggcattgtgccggagacgaacggcgaggcttaataaaacaaaaaagcatctgcaaccatcgcttctgaatttcagaatcagcgattttgttgcagatgctttttctttagcgggctcgccctctccgtcacctacggtgacacctctcccaaagggagaggccttggcagaaagatgaagtctgcgtggactgccaagggctcccactttgggggagctggcatcgcgaagcgatggctgagagggcgaggatgctgaccgtgtggtcagcgccccattttgtcgttatacctttttcagcacatactggcgggtgcccatgcccaccttctcggcctggtcaagggtggccttccactcgatgttggggttggagtccttgaagttgtcgtggtagcagttccagcccggctttgcaaggtttgcgcccagctggctgttgggcagcggggcggcattcaggcaggcatccacgcaggcctgatccagcgccaccgggtcaaaggacgcaaagataccgatatccggcaggatgggtgcatcgttctcgcagtggcagtcgcagttggggctgatgtcctgcaccagagaaatatggaagcaggggcggtcgtggcagactgcggcggcgtactccgccattttgcggtccagcagctcgttggcacagtcattgggagaatagatggcgtcaaagctgcacgcaccgatgcagcggccgcagcccttgcacttgtcgtaatcaatgaccgccttgttttcggcattgtaagtaatggcgtccgagccgcactccttggcgcagcggtggcagccgcggcacagcccctcctgcacggcgggcttgccggcagcgtgctgctccatcttgcccgcgcgggagccgcagcccatgccgatattcttgagcgcaccgccgaaaccggtggactcgtggcccttgaagtgggtcaggctgatgaacacgtccgcatccatgatggcgcggccgatcttggcggtcttgcagtattcgccgttcggcaccggcacttccacctcatccgtgccgcgcagaccgtcaccgatgatcacctgacagccggtggtcatgggccagaaaccgttcagctgggcgcagctcaaatgctccagcgcattcttgcggctgcccgggtacagggtgttgcagtcggtcaggaagggcataccgccctgctccttgcacaggtctgccaccaccttggcgtagttgggacgcagaaaagccagattgcccagctcgccgaagtgcatcttgatggccacgaaccggccgtccatgtcgatgtccttgatgccggcggcaatgcacacccggcgcagcttttccagcaggctggtgcccaccggacagcggaaatccgtatagtaaactttggatgcttccatggtgtttttcctcccatatccttccggcggcgtctgccgcgcggtctctcttttgttcagtatagcacacccgggcgagcggtgtaaacagaaaatggagcagcgccgtttttctctgcccattttggggttgacagtcctgccctgcggtgttatcttatatcggttccaaaaaacagaacggatgtcaagatacaggagtactttctatgaacgattttgatacattccggcgcgaagccgtagccgccgtccgggtggcgctgcaatggttctttctggcggtccccatgggtctgctctgcggatttctgggcaccttgttccatcttgctgtcgagcacgccaccgagctgcgcgccgcgcagccctggctgctgttccttttgcctgtggcgggtctgctcatcaccgccctttataaagtaacaaagtgcgagggcgtgggcaccaacaacgttatccgcgctgtgcagagcggcgaaccggtcagcattctgctggtgcccgccatctttctgggcacggtgctcacccacctgtgcggcggctctgccggccgcgagggcgctgccttgcagatgggcggcagcatcggctggaatcttggcaccctgctgcggctcaaggaccacgaccgccgcaccgccaccatcagcggcatggctgcgttcttctctgccctgttcggcaccccgctggcggcggcctgctttgctatgatggtggaggatgtgggtctgacctttacttctgcctttgtccccgcctttacctctgccctcatcgcctacggctgctcgctggtctttggcatcgcgcccacccactttgccctcactgcgccggagctgaatgtccgcaccgccctgctggtcatcctgctgggcgtggcctgcgctgccgtttcccgcctgttctgctacaccctccacttcatggagcacaccgtgccaaagcttctcccaaatccgtgggtgcgggtctttgcgggcggcgtgctggtcatcggcttttcctatctcttcggcgtggggcgctataacggcgcgggcatgagcgtcatcaccgctgccgtggagcagggacaggcactgccgtgggattttctgtgcaagatcttcctcaccgcgctgacccttgcctgcgggttcaagggcggcgaggtggtgcccagcttctttgtgggcgctaccttcggctgcgtggtcggcccgctgctgggtctacccgccgaatttgcggcggcggtggggctggtgtccatcttctgcggtgccaccaacgtcctgatcccctccatcctgctgggctttgagctgttcagcggcgccgggctggagctcatcgcgctgggctgcggtatctgctttatgctctccggccaccacggcctgtacagcagccagacctttgttaccaacaaactgcgctcggagtatatgtcccataagtggcgcgtaaaagtgaaaaaagcggaagagtaagattttgatcctaaaaaacaggggctgttgcgcaagcaacagccccttgttttatcatatcttatgccagcgcggtgatggctgccacagccagcacgatagcacccagcacgatgcggtagacgccgaagaacttgaagtcgtggcgcttgacgtaatccatcaggaagcggatggctgcaaggctgacgacaaaggccacaacgcagcccaccagcagcacagcgatctcggtaccggtgatggatacgccggagaccgcgaacttaatcaccttgagcagggatgcacctgccatgaccgggatggccagatagaaggtaaactccgccacgcaggcgcgggagagacccagcagcagaccgcccacgatggtagcgccggagcgggaggtgccggggatgatggcaaggcactgccacacgccgataagcaaagcatcccggtagctgatctgttccagctttgtgacccggggtgtggtgcggcggttctccaccacaaggaagagcacgccgtacaagatcagcatggcggctacggtgatgtagttatagaagtgctcctccatccagtcgtccagcgggctgatgaccagcaccggcagggtggcggctaccaccttgaaccacaggttccacacgctgggcttggagatgaccttgccctgccgcaacccgaagggccacagcttattccagaacagcaccaccacggccagaatggcacccagctggatgaccacccggaacatggacatgaattcttcactggcattgaacttgacgacctgctccaccaaaatcatgtgacctgtggaggagatgggcagccactcggtaatgccctccacgatacccatcaggatcgccttgatgatctcgaaaaacgtaataaatccctcctgcagcacccggttggatgcgtaattttttcaaaagcagttccagtataccatactatgagccgctgtgcatacagattatagaaattttcccccgggcgctgtatttatctgccccgggaaatgtgctatactataaaaataagaagtctgtccgctttctgcgcccggcgctgaaagctctgagaacaacgaggtgaaccttcatgaacatactggtgatcggctgcgatcaggtgggtgcggcgctgatccgcgatctggagcgcatcggccatgatatctcggtggtggaaaaggaccctgagcagctcaagcgtctggatgcctttgacgattatacctttcacggcactgcccttgtgggcgaccctaccgacccggacaccctgcgccggggcggcgtggagaactgcgacgccgtggcggcggtgaccgaggaggactcggtgaacctgatggcggcgcagctggcaaagaacatcttccgccgggataaagtcatctgccgggtgtccgacccgcatctgcaaattttataccacaaggcctacgagctggagaccatctgccccaccgtgctgactgagcaggcggtgttccgggctctttccaagtaaaacagcctgtttttgctttacagaccgtagaatgaggtaacgatatgaaagtttgtattgccggcggcggccgggtgggcatgtatcttgcccagagcctgctgtcccaccaccataaggtgaccatcatcgagccgcaggaggcgctgtgccgcacccttgcggatacgctggatatcccggtcatctgcggcgactctctgagctttgacaccctgcgcaccgccgacgtggccagctgcgacgcctttgtggcggtgaccaacaccgacgagaccaatctggtggcctgccagatcgccaagcgggagtttggtgtgaaccgcaccgtggcgcgcgcctccaaccccaaaaaccgggacatcctgcacacgctgggcgtagataccgtggtgtgcggcaccgacaacctgagccatattctggagcgggagatcgagaccgacaccatccggcagctgctttcgctgggcggcggcactgccagcctgaacgagatcctgctgccggaggactttcagttcgcgggcaaggagatcaaggagatccccattcccggcgatgccattctggtcagcatcacccgggataccgagttcatcatccctcacggcagcacggtgctgctgccgtgggaccggctgctgtgcctgacacaggacgacaccctgcatctgctgatggatgcgtggggtctttcctcccacaaatgagcgagcaggagctgctgcgcaccgcgctggtgctgccgccccgcgcccgccgggtgctctgcgtctgggcagccgtgcccgggctggtctgcgcgccctttgccttctggcagagcgtgtgggcgggcgcagtcttttgcgctgtatgggcggcgctggtggcgcttgtccgggtgcgctgctgcagctttgtcgccgctctgacggcagacagcgtcacggtgcagtccggggtagctgtccctgtgctgcaccgcatcccgcgccgggcggtcaccggggtgcagctgctgcgcaccccactgctgtgggcggcagggtgcactgtgctccttgtgcgcagcccggggctgcaattggtgctgcccggcatccccgccgcacaggcgactgcgctggctgcagtactgatggagggcaacgtatgaaccgggaaaagcacttccacccgctggcggcgctgcatctgctgcgcaagaccctgctggtctaccttctgccgctggtacaggtgctttttgaccgcaactgggacgctttgcgtgcggcgctgcggcaggaccttgtgctgctcttctttatcagcgccgtgtgctgggcggtgtactatggtggccgctggcaggtggatgccgagggcacggtgcacgtcagctggcggcttggcgtgcggctggaccgcgccctgcgcgccgaggggctggcggcgctgatgctggagcagcccctgctctaccgcttgaccggtgcctgccgggtggtgctgtaccctgtggggcagaccaagaccatcacgctgtatcttacccggcagcaggccgaggagcttgccgatgtgctgctgccggtgacagacccgctgtggcacgcgcccaagggcggcgaaaagctggcctttacggtgctgggtgccaacggcctgtccaccctgattttatggtggctggccatccaccagacccaaagctacgccccggacgcccagaccgctgcccttgcgcagctgggacagctggcggcgtttgccgcccgctggctgccgctgggcacggcgtggctgctggtgctggcgggtacgctgttctgcatcagtctggtgcgcagcgctttgcaggcggtgcattacaccgtctggcgcaccgacacccagctgggcagccggggcggatttatccgccggtacgagatgcggctgcggctctgccagctgaactacgccgacctgcgccgctcccccgccacatgggcgttgcattattgcccggtatttgtctcggcaggggcgtgccgcccggagctgcccttgttcgtctggcgggagggcaccccgctgctgcgggagctgctgcccgagatggcacagctgcccccggacacccgcgccgacaccaccgaccgcagcatggtgttctttttaccggcaggcatcccgctggcgctctgcctgctgctgacggcggtatcccgcaccactctgcctgcccttaccctgccgctgctcatccccaccggggtgtttgccgctctgctgggcgctgccgccgtgggctggcaccgggagggcgtatggcaacagcagggacagctgctgctctgccggcagcaccggttccatctgcaccagctgtgcgtgttccacccggacaccggctttaccgcgttgcaatctccttgggcggtgacggtgcagcgtgccaacctgacccttgtatttcccggcaaagaaaaggtcacggtgcgcagcgtgccgctggcggctcttgattttctggagatatagaagtatacttgcgatgccccgctgaacctacggtcggcggggcatttttgtaacacagaccaacggagactattttatgataaagactgtattatttgatctggacggcaccctgctgaacaccatcgacgaccttgccgatgccggcaactgggtgtgtgcccaaaacggctggcccacctttacggtggcgcagttcaagctgatggtgggcaacggcatccccaagctggtggagcgattctcccccgctgacgcccgcaccccggcgctgttggcggcaacgctggcacagttcaccgcccggtacgatgcccacaaggaggataagaccgcaccctaccccggcatcccggcgctgctggacgcactgaaagccgagggcatccagtgcgcggtgttctccaacaaggctgatgccctgtgcggcggcatcattgcccactactttggcaccggccgctttgacgccgtgcggggcaaccgcccgggcgtacctaccaagcccgaccccaccgggctgtacgccctgatgaccgagctgggcgcagaccccgccgccaccctttttgtgggcgacagcgacgtggacatcctcaccggacacaacgcgcagctgcccgccatgggcgcgctgtggggcttccgcggccgtgctgagctgaccgccgccggtgccgatgcactggcagaggtgccggaggatatcctgcggtatgtgcaggagaggaacaagtaaataatcaagaggccgttgcacagcattttgtgcagcggccttttgtgtataggacgatttgaaatggtctccgcttcgctctgaccattttttagcggaaaagcattttataataattcgcgtttgtcgcggcctgcgggccgctccaaacgcattttcacagagaggggcttaaaggccaagcggcagctgtctgaaaaagcaaaaacgcctttgcgcaatgcgcaagggcgtttttatgacccgtacgggaatcgaacccatgttacagccgtgaaagggccgtgtcttaaccgcttgaccaacgggccttacaaatacagagcttcgctaaaacctccgactttcatcgtccactactgcggacgaccgtcccccttatcttagcgaaactctgtaacgtggtagcggtaactggatttgaaccggtgacacttcgggtatgaaccgaatgctctagccaactgagctataccgccacatatttaacttgcactcgaacggtgctttattattatatccatagatgccccttttgtcaacacatattttcaaaaaaatttgcagttttttgagattcttaatttatttacataggtgcgttgaaatacaggttttcttgtcagttttgcagcaaaaaacctctcaggcgctcccgcttcccatgcaaaaagcaccgcttccctgttgcggaaagcggtgcttttttcaacctttttctgcccggttgtggaaaacccggtgcagttttagttcttcttattggtggggaccatgaccttcaggccacccatgtacggctgcagcacttcggggatggtcacgctgccgtcggcctgcaggtggttctccaggaaggcgatcagcatacgcggaggtgccacacaggtgttgttcagggtgtgtgccagataggtcttgccgtccttgcccttgatgcggatgtgcaggcggcgtgcctgtgcgtcacccagattggagcaggagcagacttcgaagtacttcttctggcgggggctccaagcctcgatatcgcagctcttgaccttcaggtcagccagatcaccggagcagcagttcagctggcgcacggggatctccatgctgcggaacagctccacagacatcttccacagcttctcgtaccagtcggcgctctcctcggggcggcagaccacgatcatctcctgcttctcgaactggtggatgcggtagatgccgcgctcctcgatgccgtgtgcgcccttctccttgcggaagcaggggctgtaagaggtcagggtcaggggcatcttgctctcgtccagcgtctggtcgatgaagcggccgatcatggtgtgctcgctggtgccgatcaggtacaggtcctcaccctcgatcttgtacatcatggcgtccatctcggggaaggacatgacgccctgcaccacgttaccgtgcatcatgaagggcgggatgacgtaggtgaagcccttgttgatcataaagtcgcgggcataggccagcacagcctcgtgcaggcgtgcaatgttgcccagcaggtagtagaagccgttaccggccacgcggcctgcggcgtccatatcgatgccgtcaaagctctccatgatctcggtgtggtacggaatggggaaatccggcacaacgggctcgccgaagcgctgggcttccacgttataggtatcgtccgggccgatgggcacgctggggtcgatcatctggggaatggagtacatgatctcctgaatgcgggcggacagtgcctcctcttccttctccagctctgccatcttgtcggcgtctgccttgacggcggcgttgttggcgtcgatctgtgcctgcagctcagccttctgtgcctcgtcggtgcacttcttcagctgaccgaacagcgggccgttggccttgctcagcttgttgcgggcggccttcagggcctccacttccttcagggctgcacggtacttggcatccttttcgatgacctcgtccaccagcggcagctttgcatcctgaaacttctttttgatgttttccttgacggcgtccgggttctcgcggacaaatttgatatccagcatgattgactctccttaactctattgggcttgcagcggtgcgcctggggctttccgctgccgttcaaaggcggcagttcccgccttggatcgcatgattattcggtttccatctggtactgtcccagcaggtttgcaaaggcgcgcagctgctcgtcggagtaaaaatgcactgtcagcttgcccttgccgccgtggtaggccacgttcacctcgctgcccagcacctgtttcaggctctcttccacctccaccggcaaagtgccgcggggtgcgggttcgcggggctccttggcgggctttgccatctttttgcaaagcgcctcggcctgacggacgttcagctggttgtccgcgatgatctgcgcggcttcggcctgcaattccggtgtgggcagacccagcaccaccttggcgtggccggtattgataaagccgctcttcagcagctccagcaccgtttccggtaagttgagcagccgcaggctgtttgccagtgcgctgcggctcttgcccagcttgcgggcggcctgctcctgtgtcaggtcgcagcgggtcatcagctcccggatgccggcagcttcttccaccgggtccagatcctcgcgctgtaaattttccaccagcgccagctccatggcctgctcgtcggacacatccttgatgaccaccggcacctcggtaagacccgccatgcgggaggcgcgccagcggcgctcgcccgccacgatgctgtaaccgcccatgggtcttggccgcaccgcgatgggctgcaataagccgtgctcggcgatgctggcagccagctcactaagggtctcctgctcaaaggtcttgcggggctggtcggggtccggctcgatctcgcgcagcggcagcgtttccaccgctgcgtgctctgactcaaagaccggtgctgcatcctcaaacagactgtccagcccgcgcccgagccctccttttcctcttgccattgtttaccttgttccccctgttttaatcttccagagcatttttcgccggctctgcggcgggtgcagcctttgcacgggacttcttaggttcctgcgggcggttgtgcttgacgaattcgatggccaagtccatgtaggcctcgctgcccttgccctttggctcgtagaaattgatgggctgaccgtagctgggtgcctccgaaatgcggatggagcgcgggatggtggtcttgtacaccttggagccgaagtacttctgcacctgctccaccacctgcacggtcaggttgtaccgcagcgagaacatggtgaacaccacgccctcgatatccagatacgggttatactttttgcggatggtcttgagggtgctgatgagctccgacagaccttccagcgcatagtactcgcactgcaccgggatgagcacactgtcgcaggcgctcaggccgttgagggtgagcagatccagactgggcgggcagtcgataaagatgaagtcgtagtccttctgcacctcagccagcgccttgcgcagacgcccctcgcggccgggcaggtcgatcatttccaagctggcaccggccagacgggtgttggagccgatgacatcggtgcggtactcggtgtgccggatggcctgcgccgccgttgccctgccgatgagcacctcataggtgcccgcttccacgctgcgctttgggatgccatagccggtggtggtgttgccctgcgggtcaaggtctacgataagcacctttttgcccagtgccgttacgcaggacgaaaggttgacggcggtggtggttttgcccactccgcccttctggtttgcgatcgctacaatttttgccacgcgcttttcttcctcccggggaaagatttgttccacatggaacacgcagtcgtgcccgccggtttccccgtccggcaggcaccttggtttctagtataacacatccaaattgttttttgaaccatctggagcgtttttcagctggatttttaacttttgggggtgaaaaagtggaaattacccctttcgtcctgcccaaggggacggcaaaccctctcagtcatcgctacgcgatgccagctcccccgaagggggagccaagagcacgcccggaagcttcctctttgtacctaatcctttagtgccaaactttacggcttggctctcccttcgggagagctggcgcgggagcgcctgagagggcccgctcccccggggggagctgtcgcgcagcgactgaggggctttgaatcggcggagccggaaaaaacggttaaaagatcttcacgccgaacaggcgtgaatcttcagtttttttcggtgtagcccacctctttggggttaaaaggggcgagcagcccctttttcgtggctccagcgcgtcgaaatcgctggcacttttctggttctctcgaacacagaagttaagcttacttgtgccgaagatagttagctggaaacggcttgtgaaaataggtagtcgccgacttttatatggcccgttggtcaagcggttaagacagaggcctctcacgcctttaacatcggttcgattccggtacgggtcaccatatgcacctctagctcagttggtagagcaactgactcttaatcagtgggcccagggttcgagtccctggaggtgcaccacaacaacaaaatccgaacttttttccaataggagaagggttcggattttttgttcgcagagtaaaacacaaactgctataagctacttcattccccttctttttcgctgtttacgatagcctgcaccttggtgggcagaccatagatgctgatgaaaccggtggcatcgctctgcttgtagtcgccgcctgcggcaaaggtggcgatgtcttcacgatacagagagaacggcgaccagaccccggcattgatgaggttgcccttgtacagttccagacgcaccttgccggtgacatactcctgtgtggaggtgacaaaggcactcagagctttgcgcagcgggctgaaccactggccatcatacaccagttcgccaaaggtgatggccagctcacgcttcttgtgggcggtgagcttgtccagcgtcagagtttccagcacttcgtgggctttgtacaggatggtgccgccgggggtctcatagacgccgcggctcttcatgcccacaagacggttctccactacatcgtacaggccgatgccgttgcggccgccgatctcattcagctttgcgatgatggcaacgggcttcagcttctcgccgttcagagccacaggagcgcccttttcaaattccagctccacaaactcggacttatccggtgcggtcttgggactgacacccaattcgaggaagccggctttatcgtactgaggctcgttgcctgggtcttccagatcaagaccctcgtggctcagatgccacaggttcttgtccttagagtagttggtctcccggctgatcttcagcgggatgtgatgagcctcggcatagtcgatctcttcatcgcggctttggatgtcccactcgcgccacggggtgatgatcttcaggtcgggtgcaaagtgcatgatggccagctcaaagcgcacctgatcgttgcctttgccggtgctgccgtggcagaccgcatccgcaccctcggcgcgggcaatctccaccacgcgttttgccaaaatggggcgggcaaagctggtgcccagcagataaccctcgtaatctgccccggcctgcatggtgggaatgacgtaatcctccacaaattcatcggtcaggtcttcgatgtacagcttggatgcgccgcttgccttggcgcgctcttccaagccttccagctcacccttctgccccacattgccgcacacggcaatgacttcgcagttgttatagtgctctttcagccacgggatgataatcgatgtgtccagaccgccggaatatgccagcacgacctttttgacctcagacataggaactgcctccgttcaaaccaacttatatacttttcgatttccctcgtgcaatttcatgattgcagtgtccattatacgggcacttggaaaatgtgtaaaaagtgttctatatatagcagcaatatgaaagcagtatttcacagcggggcattatgaatctataatagtagttggtaataaacagaaagagggtctttttgatggcaacgatattttcaagagaagaaaaggcagaggcactgttcggggagatactgaaaaatccagaagcctgccgacgcctgatggataccttcaacgactcgctggacatggcagacgtactggatgcgccgaccgtgagtgcacagcagtttgccgcagcgctgttcaatgcctacgagaacaaggatctgtctgcctttctgatggcgatctgccagcacagtatgtttgacctgctacggaacgctgccctgatcccgttcaaattcaacgccgatggtcagccgaacccggtgatcctgacggatgatgccggcgttcttttgccgaacaacaaatttgccgtgagcagcaaagtatacgaccggttcatccgggtgttccagaagcaggaaaaggtaaaaatgtaccttgccagtggctactgcaagtatcacggctacgacgaaggatcgatggatgtggtggagtaccactacaaccagcatttggggctgctgctgatctacgaactgccggacaccgtgaagcagaaggtaacggaagcggaggcctactctaccgtctgggatatccagatgaagctgcagcacgcactgccccgttccgtggtctactatggacaggatacgctcaaggacggaggaacccgctacgatgaacttggcgtttttctgccgctggaacactttgccgaccggctggaacgccatgtggaaactgctaccaagatcgtttacggcgagtaaacgccctgtaaacgaactccctttataagtgcatcacagcaaaacaaaacgcagcgaaccgttaaaagattcgctgcgttttgccttatatgggagaatggaaatgctgcacatcaggtgcaataacggaaagtcttgtcagtgacaatacgggcgaagatcagccctaacggcagtgctacgatgatgagaatggcatctgcaaaccatgtggcagagttcatcagagacaggatgcccagattatagatggcacggtagaaatacagtcccggcaccatgataacgatggacggcacagtgacggagatgcggggataaccggcggcgctcttcaggcaggaggccagcagtccggccagcagtgcgcccagaaacgctgcaacagcgggcggaaagcccgcaaggctcaccagctccagtcggaacgtgttcgttaccgcaccgataagggcggcgcagactgccaggttccggggactgttgaacatgagcgaaaagccgaacacaccgccaaaacttgccagcagccggaacacgatctcttccgggagtgtcaggctcagggcagggaactgcaccggctgcaaatgcagcagcagtgccatgatccaagccgtcatggttgccaccagaatgatgaggatggcgtaggccagacgttccagcccggagcgcatatccagcttggcaaggtcgatgccgctggtaatgaacggaaagcccggaatgatgaagagcatggagcagatataccccgcctcgtgctgcgccgatacggcaaacagcacctctgccagcttcagcagaatggcatacacgaggcttgctgaacagaccgacgccgtaatgcccagaaacagggtgaaatggtgttttgtcagcttgcaccgtacaaagttgccgatgcctgcaccgcagaaggcacacagcatttccacaatgccgccgccaagcagaaaggtgaagcagccgcaggccagtgcagctgcaaagcccagtgcgatgggcgaatacaagccgtggatgcgctcgatctcatcgaggtggctgtgcagttcttcgccggtcataaattttccttcccggtcgaagtcgttgacgaaatgctccagtcggttcagtcgggaggtattcacgcccgtatttgtcagacagagtgactgggtataacactggtcaccgtcaaagcaggtgaactcaatggacaacaggccgatgtccgctgttgttgtgactcccagctcccgcgaaagggtgttcatggagcttcggacacgccatgcgccggtgccgcattccagcagcatcagcccggtgcgtccaatgacggaggctttttccacaagccccgcctcggtaatggggacgcccttgctggccgacgcatagtcgtgccagtagacttccatgtgatttttgatgatctcactttgccgttgtcccataccggaaagcctcctttgtgatatgggaatgttgcagccgtttcaagactgcggtgctattataagggaaattgcagggcgggtaaaacgtatcttgggtatgccggcaatgttcgtttggtatttcaaagaagaaaatacgttgcgtttttggcggctctgcggtaggatagaaaaaacgcgccgaaaggaaactgccgtgacccttcaacaactccgctatgtcacggctgttgccggcaccggcaccatcagccatgcagtgcagcagttctatatttctcagcccagcctgaccaatgctatccgggagctggaacaggaagtggggctggcgctttccaagacggcaagctctgtggtgagccggacgctgctggacgcacgcggacaaatgagtgcaaaatcgatgcatccccctgcttacggtcaaaggaaatgtcaaaagaaaaagggagtgcaggagaagatgaagcacctccacaagggcggctggtgccatccccacagcacaaggcggcttgctttttgccgtggctgccggataagacaaaatacgacacccgcaaagggagctttgcccggacgtttgtccccctctaccgctgcgctcaaaacgcatagaccgcgtttgcgcagcgcagcaatgaaagccccagtggggcttttaagcggcagaacggtctgcgatagcagatggagggacctcgccccgacaagttcaacaaatgtttccaaattgttaagacgcaaaaaataagtagctgggctctgctcatgtaatggggtcaccgtttgctccgaacgaagttttgcagcggcgttgtccggctcgcccacggaaagtgtgaggtcatggcacggtatcacgttcagacggcttatgcaagattcaaggtactgtatgaagaaagccggacgcagtgcagacactacgtccggcttcttttttacgaattgagcgcctgccatagcgcatctgaagcatcaaacactgctacgctgtacccggcaaagcggctctgaatattcacggtctggcttccgtcggcggcggtattgtagctgcccagttccagcccggaaagggcgggccggctgctccacgggatgagctttgcctgccagtccgcgcccagcttttcgctcagcgccccataggcctgttcgaagccctccgggtcatccaagatccagattttgctttcgccgttggcaaggtcggtgttcatctgggtggcacccgccatctggccgttcatgtcggtcagggcggcatcggcgctccatgtgtagttgtttacctgcaccacaacagccccgtccccgttagcatcctccgcatagtctgccagtgcagtctgcaagcgctgcacggcctcgtccggcaaagcctctgccgtgaccaccgctacggtatagtccgggtctacggtggtcagcagaccgtgtgccacatacgctacgcccacaatgaccattgccgccaccgccacgatgccccagttgtaataccaccagttggcgcgggagcgctttttctgctcctgtgcggttaggggcttatccggcgctgccgggcgcgggatgctgcgcacctctacgccgtattcctgccgcagcaccgggaacagggtctgcatcgccgccagccccggcagccagaaaccgaacagcaccgcccagaagatgctgaccgggaacagcaagatcatcccgccgatgcccgccagcatgagaacgcctgccaagacgcagcgcgccggggcggcagccagcagcctgcccgcccggcgcagcaggacgtccggggcgggggcttgcagcggcagaacggcggcgcaaagcgtagccaaaaccgccagcaccagaaagtccagcgccagaaataccagcaccgcaagcccggggtaatacccctgctgcgcggcggcttcaaacacaaaggccgatacaaagcacagcagccccagcaccagcgtgccaatgcagccaaagccgcaggcggctttccaatgggcggcaagggtctgttttgcccggggcagccactgagaggggtcgttctgcaagctgcgcagggcacagtctgccagcagcaccatggcagggccggtcagcagaccggtgaccgcgctgcacaccaccgtcagcggcagggagagcagggtgacccccagcgagacccccagcgcagcgggcaggcagagcacgcagaccatcaggttcgtgcccagcagctggccgaggtcgcggccgaccatctggcaaaagcgtgcaaagccttttttctccggctcgtttgggcctacgccatggccgtcccgcccataaagggcattgtagatgctcattttacttcacctcggtgccaaaggcttcgatctgggtcagcgccgggaagggggaagtcccctcggcctgaatcagatccttcagcacaaggctgcgcacccgcttgggctcaaaggccacgctctggggcttggcgcttttcaccagcgggatgtccagcgtactgccgtcggaaaattccaccgtggccttgacccagtagttgtcgtggggaaaatctgcccgctcggtgatgcgcagctcatccagcagtacttcccggccaaaatccagcgtcagggcagcacccgggtcgcggttgatgccccagctctgataggggtactcgccgtgggcgctgttttcaaaaatgccgtcgatggcgttgcgggcggcaaacaccgcctcgccgcgcgtttctacgttggcgctggcgtgggggtaaaagccggtgtcgccgtgctcgtcatagcagttaaaggccagattccgccgggcggcaatctcctccggcagcgccagccgtgcccggatgacatgacggctgcccacaaagctcttgggcgaataggtgatggcctgctccccgaagggaatgtggaaattgatctcccgcttgaccacatacacaagggcttcgggcatggtgtcctcgaactggataacgcagtactggccgggatggtcgatctccagcgccacccggtcgccgggcttgtagcagttggtgtaaacaagggatacggcggtgtcagcgtcacaggtcatcagggtgtggccggcttcgtccagaattttcagcttgatggtctccatggcagttctccttagtacagttcgaggttcagcattttttggaaatgcagggtgatcttatagattgtttccggccatgcggtgcgcaggcgtgggtcggtgatgggcaccggcgtaacagcagccgttacggcacccgggtcaaaccgaatgccgcccagtgtgcccaccgcaaagccatccgcagcggggacaggctgttgctcggtgagcaaggtcagctccaccgtgccgggatagtccgtttcgtcccgcagggtgatgccctgttcactgaccgatacgctgcggcggtaggtggtaagctccgggatcggagggtacgcgcccgccagttcgccggtgatgctgttttctgcggtgcacacctcccgggcagcgtattccgcgccgggcagctgctggatgccgttaaaagtgggcaggttatgccatgtgctctgcatcgtccagatctcataccgctgggggctgaaggtctttttggtgtagctctccactccgatatcaatcaggaacggtctgccgtccttgtacacggtaatgctgccggtatcgttgtggttgtggctgtcgccgttggagccgaactttgcacccagcacccagctgccctgccgcgcggcatagacgcccacgctggggtaccacacagttaaatggtgccggggcgctgcggagtaggtcatcatttcttcttctgcaaaggcggtggtcagccggtaccacaggttgatgtgggtgctgccgtccgggttctgcaaatggtcggggtcggcatcggcacggaagtctgccgccgcaagggcttgcagggcatcgctgcccacagcctgcccaaagcggtattcccgcgcaccgcaccgcccggcaagggggctgcaatcgccaaagttcaggtagtaagggcctcccacatggacattgcagatgtactccgcgatatttttgatcttaggctcatggaacaggggagagaaggcctgcggtgcaacattggacaaaatttcaaggcagccccatagggtcagcccggcgtggcggtaatactgcgcaccctcgttgcagcagccgtccgcgccgtagtcctttaaaaagcagtcgaggctgtacgctgcctgtttgacggcaacctgccgctgctgctgtgtggtgggcagcagaaagaccgtgagcagcacattctgggtgcaccagctcgtccagttgcacataggctctgcgccgttgcccatccaccagaagtggcttgtaaaataaggcgtcaggatgcgggcgtccagctcccgctccatccgcaccgtggtgcccggcgcggcagtatccagctcatcgggcagtaagtaccgggtcagcgccagcagcgcgccggtctcggcggcaaataaatctacgatggggcgggtggtgtccggcaagggcagctgcggggtgtcccggatgtagctgttgtgggcgggcagctgccatgcgctttcctcgcaaagcgcccatacggtatctgcaatttcatccagaaagcgccctttgtgctccacacactcggcacttaccaacgcgcacagccgcgcccggcgggagaagtaagccgtctcccatggcgtgcgccgcccagtgtgggtgaaatccagccagagcgagagcggcaggggcgcaatgggcgtttgcagcgcggcttctcccgcctgcaaaaagcgctgctttgcccgcaggggcagcccctgccatgcagtacgttccttggcaggggggaagggccggtaatcgggaagaaattccggcagaaaagcaagttgttcctgtatcataaaagcctccggttttaaatactttgctggtattcccgcgggctgagccccgtgacctttttgaacaccttggaaaaatagaaagcgctctcgtaccccagtttctcagcgatctcgtatactttcaaatcgccctgttccagcatctccttcgccgcagcgatgcgggtctcggtaatgtactccacaaagccgctgtcgccgtatttgccaaacagctggctgaggtagttgggcgaaaaattgaatacagccgccacatcggccagcgtcagccgctcggaaaggtggctctggatgtactcctgcacctgtgccaccacctgcatcttcccggcggtggcgtcgccctcgttgacctccacgaactggatgggctgctccaccgtgagcaggggctgcaaatgggcgttttcccggcagcagcgcgccagccccagcagggaaccggtggggcgtcccaccgcccagagcagccgtaccgtgaaatagttgtatagaatttggctggcgcgttccagcagcgggcgcagcaccgtccggtagttctggcactgggcatcggtcaggcagaacagcacattgcagcgcatggcatccgccccggtcacatagcagggcaggtagttttgcagggtggtctccagcatccgcccgcaggaaaaactcagcttcagctgctgggcgggggtaagggcggtgttggcgatgatctcgcagctggctacaagataggcgtcgcttgcaaggttcagctccatgtgctgcaaaggctgctccaatgcggcttcgtccgggaacagcccggcgtacagccgcacgaaaaaacgctcctgatagctgcgcacactctcggcaaggttttcctgtgccgacaattcacccagcaaagcgcgctccttttttaccttttcggcggccttggcaagggcggtttgcaggttctcgggggtcaggtccagcttgaccagataatccaccaccccggcacccatggcctgcttgatgtaaccaaattcttcaaagctggtcagcatgataaaggcgggcaaggcgctgcgttcccggcaggtgcgggcaagggtaagcccgtccatcaccggcatttttacgtcggcaatgacgatatccggcttctcccgctcaatgagttccagcgccagcttgccgttgcgggcggtgccgcagaccgtatagcccagcttttcccattccagcatcccttgcaggccgatgagcaccagcggctcatcatccaccagtaatatccgcagcatggctgtctcctttctgttgatagggcagccggatggtgacctcggtgcccacgtcctcttcgctttcaatggtcaggccgtaaccctcgccaaaggaataccggatgcggcggttcacgttccacaggccgacatgacggaacttttcagccttttcggcaccctcggcgggctcgtccagaaggtgcgccaccagctccggcggcatgcccacgccgtcatcggtaatacgcagcagtacgtctccggtatccgggtcggtggagatatccagcagtacgctgccgtggccgcccttgggctccagcccgtggaagatggcgttttccaccagcggctgcaaggtgaaccgggggatcatgcagtcccggcaaagggtctcgctttcaatgcgggagacctcaatttccaagtcgccgccgtagcggtattgctggatggtaaagtaatcgttgagcagcgccagctcctcctgcaaaggcaccagcttctgggtgcccttggagatgctcttggtcagccgcgcaaaggcggtgaccatctcggcaatgccgggcgcgtgctggatggtagccatccagcggatgctgttgagggtgttgtagataaagtgcgggttcacctcgttttgcagcatccggtattccagctcctgcttgcggcgctcgtcctccacccggcgggtcatcaggctgtccacgttttcagccagctggttgatgccccggccgatgtcgcccagctcgttgttccactccaccgtgcggtccggggcaaagttgccgctgcccacggtctcgatgcgcttttgcagcgcctccaccgggcgggtgatgacccactccagccagtgctgcatcaaaaagctcagtccccagatgatggcaatgccaagggtgatgagccacaggtacacgccgtagtgcagcaaaaaggtatttgcgggcaaaagctgcaccagcgccgcgctgcggccgttcagtgttaccttgactacataatacttctggccgtccagccgcaccttgccctgccatgcggtctgctcggtcacgccgttattgctgccggtgcgcagggtgtagtccacctcccgcagcgggttctcggtctcggtcaggctgccgttttcgatctgccacaggcggctgcccatttcccagtacaacgcgctgccgtcggtcaggttgtagcccgcagccgggtcggtgataatggcggtgtccagcgcaaggtaggtgctgccccggtgcaaggtgcccttgccgcagcggacaggctggctgagggcgatgcagtccggactgccgggcagcagcgggtcggtggtgaactgcatcccgtaccccttggggagaaactgctttatgctggtgcggttgagcgccgccgaggagttcagcgtgccgaactgcaaatgccggtcgttttcattggtaataaaaaagcggaggatatggctgtacagggtgctggaatagtatttttcctgcacggcttcgtaggcggcaatggtctgggtgccgttgatattttcctgcgagatgtaccgccgcacggtgctgtcgatggaagcccagttcaaaagagcatcggcgctgtccagactggtctcgatggaggtagccaccagccgcaggttgaactctgccgcctgcaaggagttggcgcgcacatattggttggagagggtgaacagcgccgcgcccacggccagcgaggtaaggatggtaaaaaagcgcatcccccacacgatctgccgccgcagcgggaaacgatggctgctcttcatagcggagcctcctttccggtaatattttgcattctttcctttatacagtactgattccggcgcggtttgtcaacgacttttttcatgaaaattgtgtactttatacgcttttttcttgtgccatggatgtaaactgtgcaagagaacaagaaagtgcagactccagtgtaagaaagtgcatctttttttaaaagatacagaaaaactgcaactcttcccggaatttttccattccggtttttgcgtttgtgcggtatcctagtgtcaacaaaagcgagtggctccccggcacgggggagaccgttgcacgcaatacacacactgccctgaaggaggacacacttatgaaaaagatctctcgtcgttcgttccttaccgctgccgctgcctgcggcgctgctgctgctctgagcgcctgcggcggctcttccgcaagctccaccgctgcttcctccactgccggttccaccgctgcatccgcagcagcaggccctgttaccctgcagtggtcggtgtgggataaggaatccaccccctactggcaggccatggccgacggctacatggcaagccacaaggacgtgaccatcgagatggtggatctgggctccagcgattacatgaccgttctggctacccagctggccggcagcgccgatctggatgtcgtgaccgtcaaggatatccccggctacgcaaacctgatcaatctggactacctcaagcccctgaacgaggtgctgacccgcgataccggtgatttcaacggcaccatcgagcagctgaccaccgatgacggcaacttctacgccgtgcccttccgcagcgacttctgggtgctgtactacaacaaggatctgttcgataaggccggtgtggagtatccctccaatgacctgacgatggaagattacgatgctctggcccgcaagatgaccagcggctccggcgacaccaaggtctatggctgccactaccacacctggcgctccgccgcttctctgttctccattctggacggcaagaacaccatcatcgacggcaaatacgacttcatgaagcccacctacgatatggtcattgctcagcagaaggacggcatctgcatggactacggctacctcaagacctcttctctgcactactccgcagcctttgagaaccagcagtgcgcaatggtcaacatgggcagctggttcatttccacgctggaagcttacatgaaggatgccgagaccaagttcaactggggcatcgtcaagtatccgcaccccgccggtgcagaggctggttctacgctgggcactgtgaccagtctggccatcaacgccgattctcccaaggcagagaccgctgccgacttcatcaactggtgtgtctccgaggagggcgcacaggccattgccaagaccggcaccttcccggcttgcggctccgctgccaccgccgagatcatcaagtccaccgagggcttccccgaggacagcaattctgtggatgcactgaccactagcaatgtctatctggaaatgccctacacccagtacgcatctgatatcgagaccattctgaacgccgagcacgatgccattatgaccatgagcgagaccgtggacgagggcatccagaacatgaacgatcaggttcccgcagttctcggctgataaagcgttttccgcaatggtttgcggttctccttcttcatcattttcgatccccattcattttccgatgacgagcatcggaaaaaagccctgtccgagcggggcgggtatgcaaagcgcccgccccgctcattttttggaaaagctgttatacttccgggaaaggaggctcttttatggcgagtgctgctgtccagaataaaactccccgtaaagtgcttaaaaaatcgacccgcgattctctgatcgcgtattccttcattgcgccaaacttcattggcttctgcgtgtttacgctggtgcccatggtgtttgccattgcgctggccttctgcgcatgggacggccgccacgccatcgagtttatcggcctgaagaactttgtaaagctcttcaccaccgataaaatttttcaggcggcgctgaaaaacaccgtcgtctatgtcatcggtaccgtgccgcttacgctggcctgctcgctggccatggctgtgctgctgaaccagaacgtgaagttgcgcaacttcttccgcaccgtggcgttcttcccctatgttgcctcgctggtggcggtggcagcggtgtggaacatgatcttcaacccctccatgggccccatcaatatgatcctgaaccagttctttggcgtggcggtggaaaacctgccccgctgggctgccggtaaggacaccgctatgatcacggtcatcctgttcagtgtatggaagaacatgggctactacatggtcatctatctggcaggcctgcagggctgcaacccggacctgaacgaagccgccgagctggacggcgcaaatcgctggcagcagttctggcacatcaccctgccgcagctgcgccccaccaccttctttgtggtcattatgctcaccatctccggcttcaaggtctacgaccagatgtacatgatcacgcagggcggccccggcactgctaccatgacgctggtgtattacatctataatgtggccttcgtcaataccccgaaatacggctacgcaagtgcaatttccatggtgctgttcgtactggtgctgatcgttaccatcatccagttccgcggctccaagggcgagaactgagaaaggaggaagaactatgtctgctgctattatcaagaccgaagcctctcagaagcgccgcaacttcatctccaagttcctgatctatttcttcctcatcgtcatcacagcttgtatgctgctgccctttttgtggatgctgtcctcctcctttaagctgaataaggacgtgttcggcttccccatccagtggatccccaaaaatccccgctggcagaactatgtggacatctggacccagatcccgctgctgacctttgtgaaaaacacggtcaagatcaccgtggtggtcaccctgttgcagctgttcacttcctcctttgcagcctacgcctttgcaaagatgcagttcaagggcaaaaacgcgctcttcctcggctacattgccaccatcgcagtgccttggcaggcctacatggtgccccagttcatgatgatgagttcgtggcatttgaacaacacccatctggccattatgtgcctgcaagccttcagcgccttcggcgtgttcctgatgaaacagttctacgagggcgtgcccaccgagctgtgtgaggctgcccgcattgatggcctgagcgagtacggcatctggtggcacatcatgctgcccctcagcctgcccgccctgtccaccctgaccatcttcaccttcgtgaacacctggaacgacttccttggccccctgatctacctgactaagaccgagctcaagaccatccagatcggtctgcgtatgttcatcacccagtattccgcagagtacggcctgatcatggcagcctctgtggtggcactgatcccggtgctgatcgtgttcctctccctgcagaagtattttgtgcagggcgtggcatccaccggcatcaagggctaaacaaatcacccgtaagcggggcgtgggcagtacccgcgccccgcattttttgcagaaatagagagaaagtgttatgttatatcctgaacagaatgaagcgcgcttgaagctgagccttgacggcacatgggcgtttgcgctgggcagctgcgtggaagaccagttcgatcccgcaaagcccctgccggatgcccagcccatcgccgtgcccgccagctacaacgaccagaacgaccagaccaccgccctgcgccgccactacggctgggcgtggtatcagcgcaaagtcaccctgcccgccttctgcgcagggcagcgggtggcgctgcggttcggctcggtgacccacacggcaaacgtctggctgaacggccagcttatcgcacagcacaagggcggctttaccccctttgaagcagacgttaccgccctgctgcaccccggcgagacggtgctgctgaccgtcgcctgcgacaaccgggtaaaccacagcaccctgcctgtgggcaacgaggacggacagctggccttctttggatcggacaacgcgggcatccccagtgtggaggctgccaagcgcgccgccgcaccccagaaccgccccaactttgactttttcaactatgcgggcatccaccgaccagtgtggctctacaccacccccaaagagtatatcgaggatgtgaccgtagtgcccgccgtggacggcacggtgcagtacgcggtcaaaaccaccggcagcgcgcctgcccatgtcacggtgctggatgcggacggcaaagccgttgcaagcgccgagggtgcagaaggcacgatcaccatcccggaggtgcatctctgggagcccagacccggcacgccctacctgtataccctgcacatcacctgcggggcagacgtctacgaccagacctttggcgtgcgcagcattgaggcgcggggcacacgggtgcttttgaacggaaaaccgctctatttcaagggcttttgcaagcacgaggactttaccgcccacggccgcggctttgacccggtgctgaacgtgaaggacgtgaatctgatccactgggcaaacgccaacgcggtgcgtaccagccactacccctacgctgaggagttctacgacctgtgcgaccgggagggcattctggtcatggacgagactccggcggtgggcatcggcggcggggcggcggtgaacccttataaggaataccctcttgcggagcatcaccggcaggtgcttgccgagatgatccatcgggacaaaaaccacccctgcgtggtgctgtggagccttggcaacgagccggatctggagcacttcccgcaggatgcctacgattactggcacccgctgtatgagctggcacatcagctggacccgcagaaccgcccggtcaccctcgtctgctgccagaatgactacaccaaggatatcaccacccgcaccatggatatcgtctgcatcaaccgctactacggctggtacaacctttccggcgacatggacgctgcctgctatggcctgaatcaggaaatggatttctgggcagagcagcacaagcccgtgatgatgagcgagtacggcgcagacaccgtggcagggttgcacaccgccggagccgagatgttcagtgaggaatttcaggtggagttctaccgccgtctggatgcagagtttgacaagcgcccgtggtttgtgggagaatttgtctggaactttgcagactacgacaccgtgcagggccccatgcgggtggacggcaacaaaaagggcctgttcacccgggaccgccgccccaagctgggtatgcactttctgcgccagcggtgggcagagatccctacgtttggatttaaggagtaatcatgatgaaaacctaccagaaccacgctatgaccgacgccgaggcacggcaggcactggccgatgcctgcaagcaggtggagaccaatctgcccctgtacacctaccagtgccagaaccattccagcgtgaacaatatctaccccggctgtgccaataaccagtggacctgcggcttctggcccggtgagatctggctggcctacgaggccaccggggacgaaaaattcaagaccgccgccctcattcaggtggacagctttgcggaccgcattgcccgcaaggtggaagtggaccaccacgatatgggctttttgtacagccccacctgcgtggcagcatggaagctggtgggcagcgaaaagggcaaaaacgccgccattgccgccgccgaccagctgctgacccgctaccagcccagcggccgcttcttgcaggcatggggcaccatggacgaccccgacaactaccgctatatcattgactgtatgctcaacgtgccgctgctgtactgggcagcgcaggtgaccggcagcgaccactaccgcgagatcgccgccgcccacaccgccactacgctggcaaactccttccggccggacggcagcacctaccacaccttctttatgaacccggacggcacccccaagggcggccgcacctgtcagggctataaggatgacagcttctgggcacggggacaggcgtggggcgtgtacggcagcgccattggctacacctacacccacgatgaaaagtttttggatgtgttccgcaaagcgctggcgttttacctttcccgcctgccggaggatatgatcccctgctgggatatgctctttgccccggaaagcggcgaaccccgggattcctcctctgcggccatcgtggcctgcggcctgctggaagcagccaagtatgtggacgaaacagaagctgcccagtggcgcacgctggcgcggcagatgctggccagccttgccacaaattatgcagtaaagcccggcaccctcggctccggccagctgctgcacggcacttacagcaaaaaaagcccctacaacacctgcaccccggagggcgtggatgaatgtacgagctggggcgattatttttacatggaggcgctgacccgcctgaccaaagactgggagatgtactggtgatgaacttgcagaccaaagcggattttaccgcactgatgcacaaatttctcgacccgctcaagccttattattccgcaggctgtgcccggctgcatctgggcgagacgggtgtgacctacaaccaaaatgccattgagctggaagccttcagccgcccgctgtgggcgctggtgcccttctgggtaggtggcggctctgagccggaatttgaaaaaatctaccgcaagggtcttgccgccggcaccgacccggaaaaccccgaatactggggcaccaccggggagtacgaccagtgctatgtggagatggcggctattgcctgcggcatcctcaccgcaccggaaaagctgtggaccccgctttctgacaccgaaaaacagaaccttgccgcatggctggggcagatcaacgcccacaccatcccggactgcaactggcagtttttccgcatccttgtaaaccttgccctgaaaagcgtgggcatgccttacagcccggagctgctggaggacggcctttgcaaaattgacagctattacagcggcgacggctggtccaccgatggcgcctcggtgcagaaggattactacatcccgtgggccatccagtattacggactgctgtactctaaatttgccgcagataccgacccccggcgtgctgccctttaccgccagcgcgcccagctgttcgcgcagcagttcgtctactggttcgatgccaatggtgcagcgctgccctttggccgcagcctgacctaccgctttgcccagaacagcttctgggcggcctgcatctgggcagggctggaaccgctgcccctgccggtgatgaaagggctcatcgtccgcaacttcaactggtggctggggcagaaaatgttcgaccgggacggcatcctgaccatcggctactgctacccgcagatgtacatggccgagcggtacaacgcccccggcagcccctactggggcatgaagagctttttgttgcttgctctgccggatgaccaccccttctggtctgccgaagccgcgcccatgcccgcattggagcggctcaagcccatgccatacgccaatatgctggtgcagcgccgggcggggcgggtaacggcctatgccgccggtgtcaacgaggggcacggccacggacagttcccggaaaagtacgcaaaatttgcctacgatacccgctttggcttctgcgcctcccgcagccgggaggtgctcaatcaggcggctcccgacagtatgctggcctttgtcatcgacgataacgtgtttgtacgcaaggtgagcaaaacgtgggaaattgaagccggggctgtgactgcgcagtggtcgcccttccccggcattgaggtgaccactaccatcacccccacggccaccggccaccgccgccatcatgagattgacagcagtttcgactgcgaagcctacgactgcggttttgccgtgcccaattttgcaccgggctacgccgaaagcgtggaaagcgataccgccgaagcccattgcgacaccctgcgctgcaccgtgcgcggcaggggagaagcagtggtcatcggctgcgaccccaacaccagcctgtacttcaccaacgtacatctgcccgccgtgaagtaccacatccccaaggggcacacggtgctggacaccgagatccttgacgaagcggactgatgccgcttctctccagaaaaacagtcgtttttatgcggctgtttttcttatattctgtgctataatgagagcagaaaatgctgcgaggtgacatttatgcctttaaataatcctatcacatcggcacttctggccgacccggaaattttccagcagaaccgtctgcccttccatgcccactttgcggaccagacaagcccggaaatgcccctgaccgtcagcttggatggcgagtggaacttccgctatgcggaaaacctgaccgcaccctttacggactgggataccctgactgtgcccggctttatccagatgcagagcctgcaaaagcctggcaagccctacggcacgccccattacgtcaacacccagtacccgtgggacggccacgaaaagctgcgccccggcgaaattccgcaggattataaccccatcggggagtatcagcgtagcttcaccctgccggaaagctgggcaagctgctacctgcgcctgaacggtgccgacagtgccgccgccgtctggtgcaacggcgtttacatcggctacaccgaggataccttcactcccgctgaatttgacatgaccgccgccgtccaccccggcgaaaataccctgacggtgcaggtgtaccgtttctcctccggcagctggctggaagatcaggatttctggcgcatgagcggcttattccgctccgtggagctgttcacaaagccggaagttcacctcgaggacgtctttgtgaagcagagctttgcagatgatttttccagtgctgccgtcacctttgattgcaaggtcagcggcgcgggaacggtgtcggtggtgttcaatgggcaggagcagtccgctgaggtgggcgagcctgccgaatacgacagcggcgtggtgttcggcaagggcgaggttgccccggatgtggaggaggacgtgcaggatggttcctttacctttacggtggagcatcccgccctgtggagcgccgagcagccgaacctgtacgagacagaaattgccctgctgcgcgagggtgctctggtggagcgcaccgggctgaaagtcggcttgcgtaagtttgagctgaaagaccgccagatgcttttgaacggccagcgtattgtgttcaagggcgtcaaccgccacgagtggagctgccgcaccgggcgcaccgtcagccgggaagagatgctgtgggacgtgaaaaacctgaaggcccacaacgtgaacgccgtgcgcaccagccactacccggatgacccctattttttgcagctctgcgatgaatatggcctgtacgtcatcggggagacgaatctggagacccacggcacatggcagaagctgggcgcggacggctcggacgagtggacgctgcccggtgcgcgcccggagtggcggggaaatgtgcttgctcgcgccgaagccatgctggaacgggacaaaaaccacccggccatcctcatctggtcttgcggcaacgagagccacggcggcaagaccctgtgggagatgagcgaatacttccgccgcaccgaccccagccgccttgtgcactacgagggtattttctggaaccgggaataccccgccacctccgatatggaaagccagatgtataccccggtggcagacatcaaaaagtttctggcagagcacccggaaaagccttttatcatgtgcgagtacagccacgccatgggcaacagctgcggcggcatcaccgactacaccgagtatgcctacgaagagccgctgtatcagggcgggttcatctgggagtacatggaccacggcatcgcggtcactgacccggacggcaagcccggctttgcctacggcggcgactttggcgaccgccccaccgaccgggaattctgcgtggacggtcttgtgctgcccgaccgccgtaacacccccaaaatggacgccgtcaaggcggcctacgcaccgctgaagatcaccctgaccgacaccgaagccgtgattgaaaaccggaatctctttaccgacctgaacgcctacgaccttgtgtttgcgtcctcggtcaacggcaagccggagcgccgggcggtgctgcgggcagactgtgcacccggcaaaaccgtgcacatcgcgtttccgttcgctctgccggaggctgggcttgcctgcatgaccgttaccgccatccagcgggctgcgctgcccggcatcccggcgggctatgaagccgcttttgggcaggtatggcacaaccataccgccgcccggctgaccctgcccgccccacagctggtggagatggactgcaacgtcggcgtaaagggcgagggcttcgagtatgtctttggccgtggaaaggggcttgtgtccatccgctataacggcgtgcagctgctggacgataccgtgcgtcccaacttctggcgtgcgcctaccaacaacgacgagggctgcgcagaaccttttacatttgccttctggaaaaccgccggtctctacgcccggtgcgataatctgactgccgaagcaaaggatgagttcgtcatcgtccgcgcaaactacaccctgccagatgggcagacgcttcccattgattttgccatcgacggcgcaggccgctgcgacatcaccatgacatggcagggcgcgcgcactgagttgccggagttcgggctgctcttcccgctgcgccgggaactgaccgaggtttcctatctgggtcttggcccccgggagaccaccgccgaccgcaccgcaggcggcaaaatgggcgcttggagctacaatgtccggcaggactttgcccagaacagccccgtctacccgcaggaatgcggcagccgcaccggtgtgtaccgcgcagacctgaccggagccattccgggcatctgctttgcaggggacagcatgaccttctcggcactgccctatacgccccatgagctggaaaatgcccgccatctctatgagctgccccgggatgacaataagacggtcgtccggtgtgctttgttccagcgaggcgtgggcggcgataatagctggggcgcaaagccccatgcagacgcctgctttgcggtggagaaggaaacctcgttccgttttacgattcaaaagtaaaaatttacttggctaaagtggtgggggatcatcgtgatacccgccactttggtcttattgcgaaaccgtaacgagataaaaatcagtgcaacatataaatagtatattggcgatacgcaatccaacgatgtagctgctgcattaaaaagttgaattgcggtatccatgttgtagcggcaggaaagcagttccatcatagtagtgtcctcctggacctggacttgattttggtgtgcggccacgcaaatcaatgccgccaagtcggtggagataaaacggcaaggccgcctgctgccgccaagaagaaaaaggctgtaattctataaaaaggacggaaaaaggacggaaatcagaggaacctatcaggattctgtgctctggtggtcgatatcaagagacaagccgccaacttcaccgtggatggcctttatgtggtaagcgacatattcgcgcggattgacaccgtaattctttttgaaggagcggtaaaaggcgttataatcagaaaaaccgcatttggccgggatggaagagattggttcttttttcatcagcagtcgtttggcttccagcagccgctgctggatgacatactggtaaaagctgatctgcatattctgcttgaacatgtgggaaaaattgtatttatcaatgaaaagcgcctttgccaccgtgtccagtgaaagatcgccgctgaggttcagatcgatataatgcagggcgttgctcaggatgcttggtttctgcgccttggcaaaaacgtgttcccgattatataaggagcggttgatgccgatcaggatgcggagaatgtcggccatgccctcactgtggtaacacaggctttcctcccggtaagcgtgggtcagggcttcaaactgcccgaaccgggcgcgggaactgtccacgctatcccgaatcaaaaatgtttttgcatgacccggacggagaaagtaatcgatgtccgggtcgatctttttcatggtatcaaaagccggagggctgagccacaacacataccgctcataggggatctcaaagtcccggaagatgggatggtgcataatggcaggtgggatgatcagcaggtctcccggtttgagccggaacattttgtcgtggacaacataatccgcatttccgctgacaaagagaaaaatttcatagaactcatggtaatgagaagcgaccggaggatagctggcatccttgtaatggtcgatctcaaaatccggctcggccatgtaatgtttatcggttttgacgactttcacagaaaaatacctccggtcaaaaaattcttttgggctagttcatcataacacgatgtaccaatatatgcaatgttttgaccaataaatgccaacaattttgcaaaaaaggctggattataccaagaaatgcaaggtttttgccaaaaaaggcctgtacattacaacgcgtttgcgctatttttattgacagaaagcctgttgcacatggcagaacagaaatggcagggaatgcgcagcccgaagccctttgcggaagggataaatttcactctgaccgacaggagatcaaaaccggttttgtacgcagtcaatcaaacaaagaaaactggagatgtcaatcatgataggaacaagacgtattactcgccgcagctttctggctgctgcaggtcttgctgccgtaggcgcaagcctgtcgctcaccggatgcagcggctcggtttcagacggcctgagctccaagcatctgctggtggcacacagccacagcgaagcgcacccggtcaacgttggactgcagaagatgacggaagttgcttctgctgaatctgacctgaccttcagcgtttaccccaatggtcagctgggcgacaacgcagcaatgatccagctggtcaaggccggcgttctggatattgcaaaggtctctgcttccagcatggagcagttcaacagcgcatacgccatcttctcgatgccgtatgtgttcgagagcaccgagcagtattttgccgttatgaaccagagcgaagcggtgcaggagatcttcaagagcacctacgatcagggcttctttgccatcggctggttcgattccggctcccgcagcatctacaccaccaaagacggcccctgtgaaggccccgcagacctgaagggtctgaagatccgcacccaggacagccccacgtccattgccatgatccgtgccatgggcggcagtgcaacgcccatgtccagcggcgagacctacaccggtctgcagcagggcattattgacggcgcagagaacaacgagacagttctggtgcaggacggccacggtgaagtctgcaagagctacacctacacccagcaccagatggtgcccgatatcgtgatcatctctaccgagacttgggaaagtctggacgaggccgagcagagtgccatcgtaaacggcatgacgcagggcaacgaagcacacgaggccgtatggcaggatctggtgcaggagaacattgacggtgccaaggagatgggcgtccagttctacaccatcgacaagacggcctttatcgaggctacccagtccctgcgcgacgagttctgtgccaagagcgccgacaatgctcgttattacgaggacttcctgtcctatgtacaggcttgatgaggagggaagcataccatgttgatcgttaaattccgcggcctgatcgataagatcattcaggtcctcagcaccattatcatgggtgtcatggtcattgctgtctgctggcaggtcatcacccgctacatcctgaacaaccccagcaccgtgaccgaagaagcgctgcgttatctgctgatctgggtgaccatggtgggcggtgcttacgcatacggccgccgcaagcatctggcaatcaccgcgctgagcaagcgtctgtccttcaagggccagaagatcctggatatctttgtgcaggctatggtcatcctgttctgcgttgttgtcatgatcggcggcggcacgcgccttgtcaacaccgctgcggatcagctgagcgctgcgctgcagctgcccatgcccctgatctacgccagcgtccctgtgggtgccatcctgttcatcttctacgcgctcatcttcatcggtgaggacctgcgcgatatgaagcagggccccaaggcagagtctgccaaagaagcataaaaaaggaggacgaacctaaaatgggtacttttcaagtcggtctgctcctgatcggcacgtttgcgctgctgctggcgctgagcgtcccggtctcggtcagtatcatcatttcgtcggtcgtgaccatggcctccaccctgtctctggatctgggcactttcgttgccagccagcgcatggtgggcggcgttgacagcttctcgctgctggctgtcccgttctacatcctctgcggtgttctgatgaacaccggcggcattgcacagaaactgatcgatttcgcaaaaattctggtcggccgcatccccggtggtctggcacacaccaacattctgggcaacacgctgttcggctctctgtccggttcctccgttgcagcttccgttgctatcggtggcgttctgatccccatggaggagaaggaaggctacgataaaaagtttgctgctgccgtcaacatcgcttccgcacctaccggtctgatcattcctccttccggcatcctgatcatctatccggtgctggctggctgctctgtggtgggcatgatcatgtccggctacatccccggcctgatgtgggcactggcctgcatggtggtggcgtatgtcatcgcaaagaagaaccactatcccactgctggtaaggttccggcttccgttttcttcaagtacttcgtggacgccatccccagcctgctgctgatcgtcatcatcgtcggcggcgttatgtccggtatcttcactgcaacggagtccgctgctgtggctgttgcctacaccctgttcctgtccatcgttgtttaccgcagcatcaagatcaaggatctgcccaagatcctgctggacgcctgcgagaccaccgctgtcatcatgttcctgatcgccggctccaacgtcatgagctttgttatgagcttcaccggcctgcccagcgccatcggcaacgcactgatcagcgtttccagcaacaagtacgtcatcctgctcatcatcaaccttgtgctgctggtggttggctgcttcatggacatcaccccggctgtcctgatcttcaccccgatcttcctgcccgttgtccagtccttcggtatggatcccatccacttcggtatcatgatggtcatgaacctgggtatcggtaacatcaccccgcccgttggcagcgcactgttcagcggctgctcggtggcagatatggacatggaggacatgatcaaaccgatcctgccgttctatgcggcgatctttgtggcgctgatgctggtagcttatgtgccttggttctccatggcgctgcccaccctgttcggcgcagtctgataatgtgaaaaggagcaagttttcatggtttattcagtcaccaagtatggcgctgtcggcgatggcgcaaccaatgatgccgctgcaatccagtctgccattgatgcctgcaacgcagcaggcggcggccgcgttgtactggagggcggtcatacctactattccagttctatcgagctgaaaagcaacgtagagctgcatctggaacagggcgcccttctgaaagcgcactccgatatctccacctatttcaaccccaacggcgatgatgcttccgtggcagcagtttccggcgcaaaggccgtggatcgtccggtggcaaaaccggcttacacctttattcacgccaaggatgcagacaacttctccatcacgggtcagggtgcagtggacggcaatgtgtatgcctttatgaagcgggcaagccgttactacttcaacggtgatttttacccccgtcccaccatggtgtatgtggagcactgcaaccacatctcgttccatgacgtgacactgcagaactctccgttctggacgctgcaccctgccggatgcaacgatgtgctgatctccaacatccgggtgttgaacccgctggactgcaccaactccgacggtatcgatccggatcactccaccaatgttcggatcatcggctgccatgtccagtgtgcagatgactgcatctgcctcaagaccacagcaggcaacaacgagtacggccccaccaagaacgtcatcatctccaactgcacgctgacctctaccagtgccgcgatcaagatcggcacagagggcgtggcagatttcgagaatattctggtggataactgcatcatcaccggaagcaaccggggtctgtccatccagattcgcgacggcggctgtgtgcggaacgtgagcttctccaacatcatgatcgagacccgccgctttgccgagtgctggtggggctgcgcggagcctatcgtgatgacgacccacgaccggaacgccaacacccacagcggcagcatcgagaatgtccgcttcttcaacgtcacctgcaagggtgagaacggtgtgttcctctccggcaacgaggagaatcacatcaagaacgttctgtttgaaaatgtcaacgtctgtctggaagctaccagcaagtgggagcggggaatgtacgacctgcgtcccattccgcctgaaaaggaaggcatgctgcatcagaagagtgcagccatgttcctgcgctgggtagatggcgtcaccgtccggaactccacgctgggctttgcgggcgaggaccgttcggacttcgcacaggcgcttcttactcagaactgcaccaacgtgcagaccatgggtctgactgctgaggctgccgccccggagtaccagagcatcgaactgggctgagccatctggaaatattgaacaagccgccgcatcggcgctggccccttttgccgggtcgggccgggcggcggcttcttttgagggataaaccaatgaacaagaaaaagaacatcatcacgtttgccgcgttcctgatcctgatggtgggtctgggcgcgaacgatgccatgcggggtatcttttccacgatcttctctgcccacttccagctgagtaccgcccagttgtcccagatcgtcaccgtaagctacatcggcaacctcgtgtttctggccgtcggcggcttcggggtggatattctgggccgccgcaaggccatgctgctgtatacctttttgtggagcgcagccatgctgctgtttgccaccacggactcctatctgctgctgcttgtgggaatgttttttgccatgggcacatccacactgctgaacaccaacatgaacctgatcacgaccggtatgtttgccgttgcgcccggcttttttgtgaacttcctgttcttcattcagggcattggcaccagcggcagccagagcatcattggcaactgggctacggatatttccagctggcacaccgtggcatggggactgctggccattggcgcagtggccatggtgctgttcgtgctgttccccatgccggaagtgcaggagcataaaacggaggggaaggtatcgcccaaggagatcatgagctgtccagcatttctgtcgttggtgctgatcatcggcctgtatttcattgcagaacatggcattatgaactggctggtgagctatgctaccaatgcactggaagtgcccatgggacaggcggcaaactttaccgctgttttcttcggctgtgtgatggtggggcgtctggtgctgagcagtctggtggataagctgggcatttaccgctgcctgcggctcttcgccacaagcgctgcggttctgtacaccgcaggtgttctgctgggtgcaccgggtctgtggctcctggcagtcagcggtctgctgttttccatcctgtatccgacccttgtcatgctgatcccgcgatactggcctagtcacgcagcttcctctgcctcgggtctggtgctgagtgtggcttcgctggcggatatcctcttcaatgccgtgtttggcagcttggtggatgccatcggctaccggacctccttcctcatcatgcctgcctgcatggtgggatgcacggcactgctctggttgttctttgcaaaagctaaaaagctggaacggtgcgattaacggagatatacggccacgcaaaccaatgccctcaagttttaagcaagcataaaaaataccgcccacgcagcgctgcgtgggcggtaaatttttttttcttacccaaagtataacaggagaaccacagacagtacggatgaaaagtcgtgaagcaagatgaattttttgaattgtcgtaaataacacgattttttgaccgacaacacaaaattttgcactcttattccgttggattctctttataataagaacagaaatcaaacggaaaaaaggagatgcggatgatgcaagcaacaaacctgaaaacgaatcatctgacccagcctctcggtatagataccgggacgctgtttttgtcgtggcagtgcgccgaaggcgtgcgccagactgcctacgaaatcgaagtgaccgccggagccaaaacgctgtgggcgagcggaaaggctttgggcagtgtgatgcacaccgaaacgcccatcgctgtaccgcccaagacgcagggacggtggcgcatccgcctgtgggatgaaaatgaccagcccggtgcgtggagcaccgcttccttcgagaccgggcttgcacaggcagactggcagggcgtgtgggtctgcccggagacagaagagccggacatcgactgcaccgatgccatcaacgcctttgcaaagcccaactgggagcagaagcaggcggcgctggaagcctccggcaaagggcaggcgcagccttatcagccccaccgcccggcaagctatctgcgcaaaacgttcaccgccccggcgggagaaagcaaacggctgtacattaccgctaaggggttgtatgcggcatggctgaacggcaagcgtgtcggcgacatggtgcttgcccccggcagctttacagcagacaagcaccttggggcacagacctacgatgtgactgcgcttgtccgtgagggggaaaatgagctgctcatcgcattgggcgatggctggtaccgcagcacctccggcgtggatggagaccgtgacctgttcgggaaagaagtggctgtcctgttccagctggaagtggacggcaaggcggtctgcgtttcggacgacgatatggaggccacccagtgcggcccgattcgccaaaatgatctgcagcagggcgaagtgtacgatgcccggctggaaggggagctttccggctggcatggcgtaaagaccgagccgaactccctgcccatcaccggcatgaacaccgtgcccatccgggagcaggaagcctttgcggacaggctactgcgcacccccaacggcgagactgtgctggactttggccagaacatggcaggctatgtggagatgaagctgaccgcccacgccgggcagaaaatcaagctgctgtgcggcgaagcactggacgagaacggcaactttacgcaggagaactttcaggaccgcaaccgccacaaggagggcggcacggcgcagctgctggaactcgtctgcaaagagggcgagaaccactacaagcccagctttaccatcatgggcttccggtacgcaaaggtggaaacggacatcgacctgaccggcgcagagtttactgcccacgccgtctattcggaaatgccggtcaccggcagcttttcgtgcggcaatgccgatgtgaaccagctggtgcaaaacagtgtgtggagccagaaaggcaacttctgcgatatccccaccgactgccccacccgtgagcgcgccggctggacgggtgacatgggggtgttcattgaaaccggtctgaccctgatggattgctacccagtggtggaaaaatggctggccgagtgccgcctgaaccagtacccggatggacgcatggcgaacattgcgccgcccaccagccgccccggctacatgacccccatgctctgcatgtcggcgggctggggcgatgccgccattctggtgccctacgccctttataagcgcaccggcgaccgcaagatccttgcggacaactacgagatgatgcagaagtggtatgcgttcctgctggggcgtgcccagcagaccaccgaggaacagcagaccggtgcatacgccaagtacacggtgctgaacggtctggactacggcgagtggtgtgagccgggcattacccccatgcaggcgatgatgaacccgcgcaaaagcgtgggtacggcgtatctggcttattccgggcggcttctggcggaaatcgcgcaggcgctgggcaaggcagaggacgcagtgcagtaccgcgacacggcagaaaaggcggtaaaggcgtaccgcgccgcctttactgacaatgggaaaatcacttctgaccgccagtgcgaatacgtccgcgccattgcctttgcgctgctgggcgaggaggagagccaagccgctgcggatatcctgaaccggatggtggcggaaaacggctaccacctgaacaccggcttcctttctacacccttcctctgcgaggtgctggcaaagtacggctatgccgacaccgcctataagctgctgttacaggacaccgctcccagctggctctatgaagtcaagcagggcgctaccaccgtctgggagacatggacgggctttgacgcaaacggccaccccagcgaatccctgaaccattactcctacggtgccatctgcggttggctgttcggtggcgtgtgcggcatccatctggtaggggagaccctgaccatcgcccccaccccgaacccggctctgggatgggcaaaagcggtgtacgattccccggtggggcgcattgaaagcggctggcagtatgcaggcgatgccgtgacctacaccatcaccgtgccctgcaatctgaccgcagaagtcaccctcccggatggcagaagcctgaccttgcagccgggcacccacattctgtaacgcaaaaagatcccccgcaagacacaacgccccgtaccggaaggagtaaccggtgcggggcgttgcttttatggggataatgaagaagaaaataatgagagaatggcaggtcagaatttttgtgcaaggtattttgcactgagctggaagctcttgatgggggaattgtccacccagttgcggtggctttccagaataacggcatccacatccatggcaagggcctgcgccatcaggctgtccaggtccatgttgccggtgcccagctccatgctgtcggttttcaggatgggcgtgatggcgctgccggtgatgcgggtgccccggtcgttgatgtgccacagcttcatgcggggaccaagccgctgcatccatgccagcgcgtttgcaccgccctcggtgaaccagtagctgtcaaactcaaagttgacaaaagcggggtcggtctcttctaagaggatatcgtaggcgcgcttttccgcattcacatgccgcagctcgcagttgtggttgtggtagagcagatggatgccctcggctgccaaggcttcgccggctttgttcagccgctgcgccagttcgtgcatggcggcttcatcgccgtaatcaaaccggtacatcccggtgatgaccacatgctgtgtgccgaagctcttggcttcctcggccactgcgtgggcatcccgctccagagagccaaggtcggtgtgcaggctgaccaccttcaggcctgcctcctgcaccagcgtgtgccagtccagattgccgcccttgcccaccggcataccggcggccttggtcagcagctttaccacaaaaccaatggggtggatcataaatccacacagttcaatgccgtcgtacccggcggctttcatggcagcaagggtctctttggcctgctgctcgttgctcagtacagtgcccagcataaattgctgcacggctttgatgggcatggtttacccctccagtttgaaagtcttacccggcgtgatgccgttttcgttaaagctgtccacgcagacgtagtattcctgcccggcggtcagggtggaaagggtcacttcgtctgtgtcatacaccagccagctcagatagagtttgtcgggcgcaacgccgtagcggacgttgcagccctgtgcattttcgatatgcttccaagtgatcgttgcatccagtgcatctacgcgagccccggcggcttcagcctgtgcgggcttcgggccttcgccgttgccgaacacccgcagaccgctgatgcgcagcggctgtccatagggcagttcgccgccggtgacccggacgtaccgggcgcggatgccgtctgcatattcgtagtagccgttggagcattcccgggcaaccgtttcgcgggtcgtccagtctgctccgttcacactggtctccatcgtgtaatgggaaatctgcgggcgggtctcgatgtggcgggtcttgcggtcgtcgccgtagctgtccgccgggaaatccaccaccagcttttcatctgccatgtttacctgaatggcacggacatcattctctttgccaaggtccacgcagagccattcgcccggctctgcaccggcggcactccaccagctgcggcagtcctcgttgactgccagctccggactgctgttttctgcggtgctggaagccgtgaccggttttttgtagctcagcagcatccattccggctgctggctggcggcatcgaatttgccagccgggatgcggcgggggtaatcggcaaagttctgattgcagtagaaaaccccgtccttgtcgaacccggcagggaacaggcctacccggcgctcaaagtcatagttgacggaaatgcgcatggtggaggcgtgccaccagttgccgtaggtgtcggcaatggtgctgccgtggcctgcaccggtgatgaatccaccgggctttgcggaaaacggattggatgcctgccgcacaaagggacccagcggagaacgggaggtgtatacaccgtcggcgtacgtgttgtactgggtgccggggcaggcgtactgcagatagtaggtgtcgccgtgctttgtcatgaacgcaccctcaatgtagggcttgccgatggcgttgaacatggcagtcaggctttcggcactcaggccggggatgtttgccatctgcggcggcagattcagcttgccggtcttggggtcatagaactgcttcatggactggtacagcacgctggcttcccggtccacgatgccgttgttgccggggcgttcgtagccaagggtagtttcattgccgaagatcagctcctgcttttcaccgatgggggtcatggtgttcgggtccagctccacgccgtagatgggggcaatattggaacagccccagtagaagtacactcggccatcgtcatcgcagaacagatccgggtcccagaaagcaaagggcgcggaaacctcggtaaacggctcggtcagggggtcagcggtgcgcaggatggggcagttgcgccccttacggctggcgcagaagtagaggtaattgcccacctgccgcacatccggcgcgtagtcatagatcagcaggttggggtctgcgtggaagttccagtccagaagatcctccgagtaccagaaccctgccgacatggaaacgaacagataatatctgcctttgaagtacaccagcgtcgggtctgcgccctcccggaaacctgccacgcgggggccttccttcatgtgctggtagcggtagcccagatcaagggggttgcaataggtctgtttcatcgaagcttactccttggcaatgccctgcaatacacggttcagctgcttgatgtcctcttccgaagtgcccgcctgcatcagcatggattgaatggtcatccgctgcatggcacgctccatcatggccaccagagccggattgtccttcacggcggcagcaacgtctccgcgggaagcagcggccttttcccggatctgcttcaggatgggaccggctttcgggtctgccatggcggcagccatgttgtccttcaccgaccagcagctttcgtccagctcgccgtcaaaccagttggtcacgttcttgcggttgtccatggcgtaatccgggttgggggcgtccaccttgttcaccaggatcacgctgctgtgctcaccggagcgtgcctcaatgctgtgcttgccggtaatgggcagctggaaggtgaacaccttgtcgccctgcttggtctccaccagctgaccgtccttgtacagcgagacctccggcagattggagtagaccttgatctcggtcacatcctcggcgcggtccacatagcggctgccacacaggtgcacgaacggctccttgctccaataggccttgtagagatagaaggggtcttttttgatcttgcggtcaaaggtgacaagtcccttctggttctcgccatgcttgccgccctcatcgcgtccatcggcggcaaagtcgaacatgttccacacatgggtcgcccacagccaaggacggtcggcaatcatcttagcaatgtgctcgtggtaaacgcactggtagctctcggtgtagtcgcctttttccgggtggctgctctggtactgggggttggcatctgcgccatactccgaaaagccgatgcagcggtcagggtaatcggtatggtatttgtcaaagaactcgtcgttctgctcaaggtcccccagataccagccgaagtagaggttgtagctgttcacatcgggaatttccagaataggactggtggtctccagcataaacacgtttgccatggtggtcttgcgggtggggtccagcttgtgcgccagctcgttcagcagacggtggttttccagcagatcctcgttgaccgcagaggcggcggtgatctcgttagaaaggccccacacggcaatgcaggggtggttgtagttctggacgatcagctcttccatctgggtcagggtgttggcacggccgttggtcatgtgcatggtgatgtaggggatctctgcccagatgacaagacccttttcatcgcacaggtcgtagaaatactgtgcgtgctggtagtgggccagccggatggtgttggcacccatttccagaatgagggccatgtcctcctccatcatttcgttggtcagggcattgcccatacccttacggtcctgatggcgggaaacgccccgcaggggatagctgcggccgttcaggataaagcccttctgggggtcaaactcaaatttccggcagccgaaccgggcggaagcttcctcgccgttgtccagcttggcagagacgatgtaaaggaacgggtcctccacgccatcccacagatgggcattgtgcagggtgaaaacagcctttgcggtgccgtcttccaccggggcagcgatgttctgcccttccagtgcaaaggttacgctctgtgcgcccaccacggcagcttccacagtaacttcaacggtcttggaggcaaggccggtgacgatgggggtcaccttcagtgccggggcgccattagcgggcagggcaaagtgctctgccgggacgatgtgcagggtcacatcccggtaaatgccgccgtagaaggtaaagtccgccttctgggggtacacggtgtcgttgtcgcggttgtccacgctgatggccagcaggttctcgtctttcaggtggtcggtcaggtccacccggaaggtagagtagccgcccttgtgctcggccagcttttccccgttcaggtaaacggcggcggtcatggctgcgccgtccagctgcaaaacagccttgccgcctgccgggatggcgggctttgtcagggccagtgtataccagcaggtgccgcggtagtaatcgttgccgccgtcctgaccgtccaccgcgttccatgtgtggggcagggcaacggcctcgcccataacggcggcggggatgccggggttctccttggtaaaatgccagtcgctatgattcagcaggatggtcttgctcatggtaaaaactcctttatatttatactttatatttataaaagatggatagaatcagcaaaaaccgaaagagcgtatgagccttttcggtctttgcagggtgttactgcatatgttctgcaattacttcacggcgaagagcgtcttttttatctgcgatgcgcttctggacgttgaccatttcctccttggtcagggggcagcccaccatggcgagcagggtgacgacccagcccagcatcggcagaccgtacttgatggcaagggtcatccagaagatgccggaggtgtaggcatccgtgggctgaggcatggtggtggtgtagcccaaaagggcgaccgcaccggtggcgatgacagcagccaccgaggtgatgagcttatcgatcaggctgtaagtgccggagacaaccgccggaatgtaacggccgctgcggtccagctcgtagtcgatggtatcagccatgtaagagttgttggaggtggtgatgcacatattggaaccgttctgcagcagggtcagcaggacataaacgatcatattccagctgccgatcacaccgatctgacgagtatcggtaaagatgaagaacaggatcagcacagcggtgatggtcatgctgacgcaggtccaggtcacgatgcccttcttgctgccttttttacccacatattttgcaccgaaggccgcaaagaagatggaaggcaccatgctgatcatgctaagggtggtagcaagacccatgttgccgatgaggatgccgttcagcatcgtgttgatgatggcctgactgcccacctgctgcgccagcttatcggaagcgttggaggcgatgtagcactgcaggggcttgttgtgcttgagcacctcaagtacgtccgccattttcagcgactcatgctttttgttggtgccctcgaagttttcgggcttatcgtaggcggagatgccggcgcagacgatcagggtgccgatgccggcaatgatcaggacgatggtgcagacggtgctgaggaagtcctgattaaaggtgccgccgcacttgggcaggatgacggtgtagatcagcatactcatgcccatgggcacggcgtagttcagtgcagtggtccagacaccgatggtgggacgctgccggggatcgttggtcatgatggcaggcagggtctgggcggtcatgttggtgacggtgtagccgatgatgtagataatgtaggtcagggcaaacaccggcaggccgaagcccttgctggagcacaggttgaacatgcacagcaggccgactgcctcgatcaggtagccgctgatcagcagaacgcgcagcttaccgaaacgggtgttgacgcggtcgtagacgaatgccagcagcgggtcggtgaagccgtccagaatgcgggccagcatcaggatgatgccgacggttgcagtagtgatgccgtagccgatactggcagaataacttgccataccgatcagggaatagacgctcatgcccacaaaggcgttgcaggcgtagcagatgatctgccaggttttggcgcggcggtactggacgccgtctacctcactggcgctgggtttcttttggaacataatgatttttcctcctttttgtgtgaaacggtttccgcttttcctgacaccagaataacagaatgcaataggtactgccagacaaaaaattggaattaaggataaaaattcgtgcagttctgaccactcgacgaaaaatttaccaataacgtgaaaaattatcctttttgctccgcacagacctgttacaataggcacagagaaaacacggcttctgaataaaaaggagaatcatcatgcagaaatttgaaaaaggctttttcatcggtgctgcaacagcagcccatcaggtagagggtaacaataccaacagcgactactgggcacaggagcagctgccccattccagctttacggagcccagcggcattgcctgcgaccattatcatcggtacgaagaagatattaagctgctggccgatgccgggctgaacgcctaccgcttttccatcgagtgggcacgggtggagccggaggaaggaacgttcaatccggaagccattgaacactaccgcaaggtgatcgcctgctgcaaagcgcatggtgtagaaccggtggtgactctgctgcacttcaccagccccaagtggctcatctgcaagggcggctgggaagcagagtccaccgtggaggactttaagcactatgcagcctatgtcatggagcagctgggcggtgagctgcattatgtctgcaccatcaacgaggccaacatgggcttgcagttggccgctatttccaagcggttccgcctgatggcagaacaggctgccaagaatgccgctgcagccggaaagtctgccgagggcacggtgcaggtgggcatgaacttccagaagatgatggaaaacatgaagtatgctgccatggagaatgcgcaggtgttcggcacgccccagccgcagatctttgtcagcgagcgcaccccggagggcgacctgctggtgctgcgtgcccatgcagccgcacgggatgccatcaaggccatctgcccgcaggtcaaggttggcctgaccctttcgctccacgatctgcaggcacagcccggcggcgaagcctttgccgaggccgcatggcaggaggagttcacccattatctgccctacatcaaagaggatgatttcttaggtgtgcagaattatacccgcaccctttacggcccgcaggggcagctgccggcaccggagggcgcagagctgacccagatggattacgaggtctatccgcaggcactggaacgcgtcctccgcaaggtggcagagaaattcaagggtgatctcatcgtcaccgaaaacggcattgccaccgccgatgatacccgccgtgtggcgtttatccggcaggcactggacggcgtgcagcactgcattgccgacggcatcccggtgaagggctacttccattggagcctgatggataactttgagtggcagaagggctatgccatgcagttcggcctgatcgccgtgaaccgtgaaaccatggaacggaccgcaaagcccagccttgcggtgctgggggagtattgcggagcttgagagggggttccgggcattggtagaagaaacggcggaagtatgatatactatttctatcaatgagtcaatgagccggaggggttacacatggatgttctccagaatatgatgctgttttccgagcttgtccagtgcggcggcaatgtttatacatggtgctatgatgcaaagggaaagctactacggagcaactgcccggacgaggcttttctagccagcgcatttgagctgttcggctgcaaacagcggatgctggagcatgggaaccgggatgatgtacccgttaccttggggacggctctgggtcttttgtggggcgcagcttttgaaaaggaagaggggaagctgaagcgtgtctgggtcatcgggccggtgttccatcgggatgtgacaatgcgcgggatcgaggacggactgaaatattacagcaagctggagatcagtgtggcatggacgatccagctttacaaagcccttgaaaaagtttctaccctgcaaaacaccattatataccgctatctgctgatgatgcactactgcctgaccgggcagcggctggagctgagctgtgtcaacagcagtgcagcacaggaggagcggctggaaagctctgccatcccacacgaccggtataaaatctggatggcggagcagggaatgctgcagatggtccgcaccggagatatgaattacaagcaggcgctttctaactgtatgagcataagtgcaggtgtaccggtgcagagcagcgatgtgctacgccagagcaagacctccatcatcgtgttcacctctctggtctgccgtgccgccattgagggcggcctgtccccggaggaggcatattcgcttggggacagctacattcagacggcagaagcggcaaaatcgctggatgagctggccccccttgcaatgatgatgtacgatgatttcatccggcgtgtccacaagcaccggacaaacccgaacctcagtagacagatccagaagtgtgtggattatatcgagatgaatctggacaaaaagatcgtagcggaagatcttgccgccctggtgggctacacagaatattacctcacccacaaattcaaggaagaaacgggtctgagtgtgacgaactatgtaaagtttgcaaaggtcgaacgtgcaaaggttctgctgaaaagcacaccgctcagcgtccgggaaatttccgagcagcttggctttgccacccgcaattatttcagtgcagtctttcagcaggtcaccggaaaaacgcccatggaattccgggaaacataaagcagaacaggcatcctgcgttaccgtttggcggtatcggacgggatgcctgttctgctatgatgaagaagaatggagaaagatggcttagttgagaaacttctcgttcagggtcacaccaaagtcgcgggcgatggcgcgcaggtcgtcgtcggtgatggtctgccggatgatgccgccgcccatggagagcaccttgacgtaaatttcggcgctcttttcgatggtgtgggccagaccgaaggtaatgtcaaagtccgggccggaagcaaacagaccgtgctgtgcccagatggcagcctgataagtcttcatcagctcactggtggccatggcaatgtctgtcccgccgggcaccatccacgggcagacacccacgccctccgggaacaccaccgggcactcggtggcgctctgccacagcgcacgggtgaaatcccggtcggtcaggggcaggatgtaggtcagggcgatcacgttggtggcgtggcagtggtagatgacacggtttgcgccgcccgtggcggccttgcggacgctgtgattcataaagtggctgggaaactcactggtgggctttgcgccatcttccagaccccagacgatgcgccagctgtcgcccttgtcgttgatctccacgatgccgatgctgtggacagggtccggctctacgttgcggaagaacttgccggagccggtggtaatgaaatactcgcccgccagattatccgcctgcacccccatgttcacccattcgcggggctgcgggtcaaagaaggggcggcactgcgccacttcttcttccttcatgcggtaggtcaggttgccgccgttgcgctcgtgccagtcctgcaaccagccatcgttgcacatccgcataaagccttttacaatctcaatatccagaatacccatcttcaaaaacctctctcattcaaatgcgcttgctcagcacgttctgctcgtactttttgacttcctcaaaccatgcaccgtccaccggcacaccgttccggcggcagtattcgtcccagacctcgccaaagggcagggtcttcagctcctcctgccgcaccatcagctcggtgaactggttggtgtcctgcagctccttcagcaccgtatgcggggtgcacagggcagacagcagcgccttttccacgttgcggaagcccaccgtccatgcggagatgcggttgatggaagcatcaaagtaatccagtgcaatgttcacccggccgtccagaccgccgcagcgcacgatctccttgcagatctccttcgtttcatcgtcgaacagtaccacatggtcggagtcccagcggatggggcgggtgatgtggagcgcgatctccgggaagaaggccagcagggcgggaatcttatcgctgaccacctcggtgggatggtagtggccgttatccatcagcggaatgcactttttccggttgaaggcggcgtagctcagggcaaactcggcgctgcccacggtgtaggcctctacgccgatgccgaacaccttgctctcgatgcagggcttcaccagcttgaagtcgtaaggctcgctcaaaatctcgtcgatgctggccttgtaacggtcgcgtggacctttgcgatccgccggtacgtccttaaagccgtcgcccgtccagatgttcatggtgcagggctgccccagctcctcggccagatactggctgatgcggatgcaggccttgccgtgttctacccagaatttccgggtctcctcgttagggctggcaagggtcagcgggtcgcacttggggtgggagaaaaaggtggggttaaagtctgcgcccagccctcttgccttgcaaaaatctacccattttttgaagtgcttcggctccagtttgtcccggtctacccacgggttctcctcgtcaaaaatggcataggaggcatggaggttgatctttttggtgccggggcagaaggacagcaccttgtccatatctgccatcagttcctccggggtgcgggcacgaccggggtagttgccggtggtctggatgccgccggtcaggggcttggtggggtcggtatcaaagccccggacatcatctccctgccagcagtgcagggagataggcacggtctttaaccgggcaatggcagcttcggtgtccacgccagtggcggcgtagcgggcttttgcttctgcgtaactcatacggttcctccttcagaaatgctcatctggatcttcaagttgccgatggcggtggcctcgatgggcagcgccaccacctgttttccggtatagtgggcggttagctcgttcagggtagcgttctttgcgccgccgcctgcgatgtagagtttatcccagtgctggccggtgagggcttccagctcccggaatgcttccccgtagcagtacgccagcgaatgatagacactgttgataaggtcggcatccgtggcaggggcttcgccggtctcggcaagggcggctctgatctccgcgcgcatgtcctgcggggcagagaaccgggctgcgttcacatcaaaaatgcgggtgtaggtgctggtcttggccagctccaccatctcggcaaaggagatgcccagctgtttttgcacacactggatgatccacagacccatgatgtttttcaggtagcggatgtagcccacgccgccctcgttggtaaagtttgcgcggcagctttccgggttggtgatgggctttgccagcttgacccccagcaggctccatgtaccggaggacaaaaacggcgcatccccctgttccatggggatgccctccaccgcgctggcggtgtcgtgggtggcgcacagcactaccttggtctgcccgcccacctcggcggcaatgtccgccttcaacgggcccagcaccgtaccgggtgcggtgagcttagggaacattgcctccggcaagcccaaagctttgaaaatctccgggtcgtactccccggtctgggcgttcacaaggccggtggaggtggcgttggtgtactcccgcgcctttacgccgcacagcttccacagcagatattccgggatcatcaaaaagtcctcggcctgcgccagccgcccggcctttttatcggcataaagctgataaatgctgttgaagggctggaactggatgccggtgcgtgcatagagctgcgcaaagggcaggatgctgtggacttcgggaagcactgcctgcgtccggctgtcgcggtaggcgtagacaggggagaggggcttgccgtctttcagcagcacatagtccaccgcccatgtgtcgatggaaaggctctcgatattcggatattttgcaaaggcttcccggatgccctgcttcacgttagcaaacaggctgtcgatgtcccattccagatggctgtccacccgttggacgctgttggggaaccgatacacttcttcggtgcggagaacaccgttctccatccatccgacaatgtgccgcccgctggacgcaccaatgtcgatggcaagataatttttgtgcataatgcgcctcctgtgtggctttgactgctaccagtatagcggtataatgcgggcaattccatccgcaaaggtgacgcattctttgtgaaaagtctactcttgcgctgcaaagagcggtgcgctatactgaatgtggaaagagaggaaacggaaaatgctgacctacaacatggatgtgaccccggagagtgtatggaaacgcactacccccagcgaagcagagctggcacagccctactactgcaccgaggcgggagtgttctatgcccagcagcatttttccaccgcccgcaccgataaagaaagctaccttctgttttataccctccggggtgcagggctcatcgagcagggggaaagccatgtggtgctcagcaccggacaagcattgctgctcaactgccgcaccccgcagagctactgcaccgccccggggcaaagctgctggcatcattattgggttcatctggacggcgcaggggtggctgccatggagccgctgctacttcctggcaaaaaactgaccccggtgcagctcaccggggtcaagatgcaggaatattttgaaatgcttttagggcagatggagcacagcaccgtggacagcatggtgcagatcggccttgctctgcacggaatgcttgccctgtgtgcgcagagcagtcttgccgaggccgaaaccaccagcgcgcggcaggtcattttgcaggcggtggagaccatacgcaaacattaccagcaggaactttgccttgccgacctgctggcagaggcgcacatgagcaaaagttattttctgcggctgttccggcggtatatgggcacgacaccgtataattatctggtcaacttccgcattacacaggcaaaggaactgcttgtcctcaccgaccacagcgtcagcgagatcgcgcaggaggtcggctttggggatgccagcaacttttccacccggtttgcaaaagccaccgggcaaagccccctgcaataccgcaaaagtgcgttgaagccgcaggagggcacaaggtgaacaaaggttcttgacctttttgccggagctatgctgtatgtggtggtgtaggaactgatcccggaaatagggctttatgggggcagaatcttttccgcaggggaaaagcgtggtatactgaacgcaatgaaccggaacggatcaaagaaagatgaggactgtgaaatgaacatcaaagaacgggcagcgcaggctgccgcatggaaagctgccggacagtgcaactgcgcgcaggcggtgctgaaagcatttgaggataagctgccggtggatgccgacaccctgatgaagctgggcgcaggctatgccgccggtatgggctgcatggaaagcacctgcggtgcactcatcggcgcagtgatggtggcaggcgttgtcaccgacggcaagggcacgccccgcatttccaaggaactgctgcagaactttcaggaaaaatgcggcgctaccatttgtaaagacctgaaaggtgtggagaccggtgcaccgctgtgcccctgcccggagtgcgtccgcaacgccgtgctggcactgggcgaggtgctgggggagtaagatgaaaaaagtcttgtttgtttgccacggcaatatctgccgcagccccatggcggaatttgtgatgaaggacttagtggaaaaggccgggctttccgcgcagtttgaaattgcctcggctgccacaagcaccgaggagatcggcaacccggtctatccgcctgcccggtgcaagctggcggagcacggcatctcctgcgcgggcaagaccgcccggcagatgacccggcgggactacgagacttacgattatcttatcgccatggatcacaacaacctgcggaacatggcacggtttgtgggcggcgacccggagcacaaagtctcgctgctgatggatcacacccgccgccccggcgatgtggcagacccgtggtacaccggggactttgaagctacatggcaggatgtgctggagggttgcaccgccctgctggaagaactgcgataaaaaggggaaggctacgacagaacgttattgcgaaggtgaacggtttaccggcctgtcatttgcaggggaagcctttgaaagctgcgattttgcggactgcgtatttgtggactgctccttttcaaaatgtgagctggaccacaccaccctgaacgagtgtcggttcgtgcggtgcgagatcaccgggctgcggagcgtgtcctcctcagtgcagtcgctggattttgaggactgccgcctgcaggagatcgagtgggcatcgttgctgtcaaacggcgcattcccagaccctatccacaccctgaaggactgcagcctgaaatacaacacctttaccgaaatgaacttcaaccgctttgatttttcaaacggaaacgagatcgtaggctccatgtttgccaagtgcgagatgcaactggcaagtttcaagggcacagagctgcacgaaacggagttctaccagtgcgatctgcgcaaagcggatttccgggacgccacgggctataaggtggatattctgggcagccgcatgaaggatgccaggttctcgctgccggaggcggtaaatctgctggctgatttgaagatcaagctgtcctgaacagggagggcaacggctacaccgccgacaagctgaccttgcaggatctggaagccgagtaagacataataaaataagtgaaaagggagctctgcccggacattcgtccgtgacggaactcccttttttgctttgtatttcacggaaaaagacctgatacaccgacaagggcaaggcggaaaaacaccttgcctatgcctgctgctttcggcagaacgacagaaattttctttaaaatttgtgcaattttcaacggaagcaaaatgaccggcagtcaacactttattattttaacacggcaaaggctttttgctgcttctcctgccggaaatgtatccaaaagctgttcacactttagtcatactcatttgacagaaactgcttttttgggtatcctgtccgtatcatgaggacggcgggcagaaaatgcccgctttttttcgtttattctgtatttataggaaggacaatctatggcaaccatgaaagatatcatccaaagcccgctgctgctggcgctggtcatcggcggtcttttgtacatttccgcattctcgttggtctacttgaaaaaggcctacgaccactgtctggagctgggcatcacccgcaaggaactgagcaacgtgatcaaatccagcctgatattttccgtcgtgcccagcctttccatcgtggtgggtctgttcgtgctcattgcggtgctgggcagcgtgtgggcatggtggcggctgtcggtcatcggttctctgtcctacgagactatgatctccagctccattgcgcaggtgctgggctacgcatcctctgcggaaatgctggaaagcgccaccggacggcagttcggcgtggtgatgatcctgatgagcgtgggtatgctgagcggtttcctgatcctgctgcccctcggcaaaaagctgtgcaagagcgtggaccgctctgcagccgaaaacggcggcagcacctggaaaaacgtgctgtccggcgtgttcatgcttgtgatgttctcggtatacattcccattctgctgttcactgacaatggatcaccggtcttgtgatcgccattggtgcgggcgtgctggcaaagcgcccgggtcttgcatggctcaataacttcgtgatggcattctccatgctgggcggtctgatctcgtcgctggcgtgggtacggattttcggttgaggagggaaacggacatgagcaaagcaaagactgagaccaaaatggactccttccagagctgggcgcaccgctggggccgtgtgggtaccctgatcgccctcatttacatggtggcgctgccctttgtggtgctggctgcctacgacagcatcccgtctctgggcgaggtgttcaacgtgaacaccttttccatcctgctcatctacatcccggtgggcttttcggaggcactgagctacacccccattctgggctgctcggcctatctggcttttatcaccggcaacatcatgaacctgaagctcccagtggcggcaaacgccatgaacctgaccaaaaagcagcccaacaccccggagggtgaggccattgcctcggtggctgttgcggtctcctccctgatgacggttgccatcctgacgctggcagcggtgtgcgcatccttcatcagcccggtattcgagctgcccgccgtcaagacagcctccggctacctgctgccggccctgttcggctccatggcgctgggcctgttcgccagctcgtccagtggcagcaaggtggtcaagggtggaatcaagggggtgcttccggtgctgatcatcatgacggtgctctcccttgccgcacgccttgcgggctacggttccgtgctgggcgggcttgtgggcatctttatcatcgtgatgctgcccatcggcatcctgacttcctatgtgttgtggaagaagggcaagatccaggtagtggacaaagagcagaagtaaagcaatcggaacggtctggatcctgtatggtacagggctcaggccgttttgctttcattaggggggcaggggtgcctactccgcacctttcgaaaattgacaaataattctcaattttagtattctcaacgaggccattgagcagatcagctttcaggctacgaaggcctgagcctttgccgctggcagataaaggcatagaataacaaaaaagtctgaactgaggcatgagccaccggttcagacttttttcatactatgaaaacaccagttgctgcggatagcagcgtgcagttcaatttgttatcagcactcgtcgtactgtttttgcagatattgcaggcactggactgcgttttccggggtggtgttctccaaggtggcgaacacatagggcttctgttccttggcaaaacgcagaatggtgcggtagtcgcccataccgccctgtccggcaccggtggcagccagctgcccgtcggcgtcctgcagcaaaaagtccttgaagtggatcatggccacatccttgcccagcagctcaatggtctcggcgaacacttcctcccgctggtctacgttttccatgttcaaaaggttcaccgggtcgagcagaatctgcagattggggctgccgatctcgtccagcacggtgcgggcgcggcgggcgtcatacacaatgtgtctgaccaccggctcaatggcaatggtcacgccatactgctcggcgcagcgcaccaccggcttgaagtttgtgataaaggtggcaagggcggcatcgctgcggcactccgggcagaacttgtactctgcgttgggtgcaccggtctcggtgcccaccatgccgcagcccagcaggctggcaaagcggatatgcgcatagtacttttcctgaatggcgtgcagggcagccgtatccgggtgcgccagattcaggtagttgcccagcaccgcaatgtccagctcgtttttggcaaacaggcggcgcagataggccgcgtagccgggggtgagggcagagggggtgttgggcacctccttcagggatttgctcagcgccagatgcacgcaggaaaagcccttctggcgtaccagcggcagcacctgttcaatgggcagcttttctgcgtcgtgcagacgtagaccgaattggatcatgcttggttcctcctttaatatgggtgcgtttttaccattatacaccaaaattgtttgcgggggaacaccttaaacgccttttagcgctgctgatcgttgccccgggcagcacctgacaacgcgagtgacgcagaagtgtgttaaaaagtgtgatataaagaagataaaatacggatttgttagcttgtttgttggattatgacataatttcaggcatttcacaacacatataaaagcaaaaatcccacgatacacgccgttattttaacggtatatcgcaggatttttcttggagctggtgacaggagttgaacctgcaacccactgattacaaatcagttgcgctgccattgcgccacaccagcaaaggttgctaaaatagtataacacaggcacggcaatttggcaaggattgtttttttgcaggggataataatgccggaaaacagacaaaaatgatagaaaacaatacacaagtataaaaatatgctacaattttaaacaattttacattgcaaattttttgacgatgtgctatgctgaaacgtagaggaacgccgccggaaaggcggctgcaaacagatttggaggatttgtattatggctgaccgcattgttctgaataccatctcctaccacggccacggtgctatcgagaacatcgttcccgagctgaccgcccgtggctacaagaaggctttcgtctgctccgaccccgacctgatcaagttcggcgttaccaaaaaggtcaccgacctgctggatgccgcaaactttgcctacgctgtttacagcgagatcaagcccaaccccaccatcgccaacgtacaggacggcgtggctgccttcaaggctgccgaggctgactgcatcgtgaccatcggcggcggctcctccatggataccgcaaaggccatcggcatcatcatcaataaccccgagtttgcggacgtccgctctctggaaggcgttgcccccacaaagaagcacgcggtgttcaccatcgcagtgcccaccaccgccggtactgctgccgaggtcaccattaactacgtcatcaccgatgtggagaaaaagcgcaagttcgtctgcgtggataccaacgatatccccgagatcgctgtggttgaccccgatatgatgtcctccatgcccaagggtctgaccgccgccaccggtatggatgcgctgacccacgccatcgagggctacatcaccaagggccactgcgtcatttccgatatgttccatctggaagccatcaagctcatcagccagagcctgcgcggcgctgtgcagaacaccccggagggccgcgagggcatggctctgggccagtacatcgccggtatgggcttctccaacgtgggtctgggcattgtccactccatggcacacggcctgtctgccctgtatgacactccccatggtgtggcctgcgccatcctgctgccggtgggtctggagtacaacaagagcgttgccggtgagcgttaccgcgccgttggcaaggccatgggcgttatgggcattgacgagatgaacgatgtggaagccgctgatgctaccatcgctgccgtcaagcagctgtctgctgacgttggcatccccactaacctgaatggcatcctgaaggaagaggacatccagttcctcgcggagtctgcttatgcagatgcctgccgccccggtaacccccgcgacaccagcgtggaggagattgtggagctgtacaagagtcagctgtaagctgtaaaaaatgaccctgagagccgctgcaccgtgtttgtgcagcggcttttttagcggaatgatgcgttcgtaaaatgaaatcccgcgccaattgtaacatttttccgccaccccttgtacaaatcggcgcaagcgagtacaatcagagcataaaatttgaaggcgaggaaagcgcgatgacactgaatttctacacgctgggcgtgctgtatctggtctattccttccttgggtgggtaggggagaccgtggtggctaccttccggggcaggcggtttgcaaaccgcggcatggcggcggggccgttttgctttgtgtatggtaccacggccatcctgatggcagtgggctttgcagatatgcgcacaaagccggtggtgctgtttgtggcctgtatgcttacggctaccgtggtggagtggctcacggcaaagctgctggagcggctgcacaaccgcaaatggtgggattactccgataaaaagttcaacctgaacggctacgtctgcctgcaatactcggtgctgtggggtgcgctgggcatggtgaccgtgctttggggcaacgggctgctgctgcgtctgtgcgcccttgtgccggactggctgctgcatccgctggtatgggttgcgctgggcatcgcggcgctggaccagctgggctcggcggttctggtggggcggtacgcggcgcagcacccggtgctggaacagctgaaccagaaactggaggcgcgctccgacaccttgcgccgccgcattgccgtgtatgtggaaaagcgtatccagcgcgcctacccggaagccgcccggcagcagcccacggcagcgcagaaggggcaggccgacttcctcagcgcggcagacctgctgtggctgtttgtcatcggggcgtttctgggcgatatggtggagaccgtgttttgccgcctgaccgccggggtgtggatgagccgttccagtctggtgtgggggcctttcagcgtggtgtgggggctggcgctggccatggctaccgtgctgctgcggcagaatcaggacaaaagcgaccgctatctcttcgccttcggcacggtgctgggcggcgtgtacgagtatgtgtgcagtgccgtcaccgagctgttgttcggtaccgtgttctgggattacagcaagttcaagttcaatctgggcgggcgtatcaacctgctgtactgctttttctggggcattgcggcggtgctgtggatgcgctacggctatccgctggtgctgaagctgatgaaaaaggtgcgcagccatatccgtccgtggatgacagcggcactggcggtgttcatggcggtgaatatgcttaccagcgcgctggcactggcgcggtacgatgcccgcaccagcggcgaagcgcccaacggacagctggaagtgttccttgatgagcatttcgacaacgcccgcatggagcgcatttaccccaacgccaaaaaagtgatcaaggcagaataaatcccatatttccccttgcgcttttgccggaaaacaggtataatattctctggataaaagggagtaaggggcgtatcttggttaaaaactggtgcgctgtgctgcagcgacagtcccggcagaaatgcccgatgcagcaccggatgcttgagacttttatcacatttccccgttccgggcaggatgtgataaaggtctttttttgtgcctctgctgctatcatttgaaaaaaaggagaaatactatgctgatccctgttctgttgtttatcgtgggtctgctgtgcctgatcaagggcggcgactggtttgtggacggtgccaccggcatcgcccgccgcttccatgtgccggagttgctcattggtgccacggtggtgtccatcggtaccaccctgccggaggtcatggtgtccaccacctctgccctcaccggtcacggcgagatcgcctacggcaacgccatcggctcggtcatctgcaattctgcactgatcgccgccatcaccattgcggtgcgcccgggcaaggttgaccccaagagcctgcgcaccccggtggccttcttctttgtggctgccgctttctatgccggtgtggcctacaccaccggctccttcacccgcccggtaggtctgatcctgctggccatgttcgtggcttacatcgtgtgcaacgtgctggctatgaaaaacacccccgccccggaagaggaggagcaggctgaggaaggcccctttgccaaggagttgggtctgctggtcatcggcgcagtgctcattgctgtgggcgctgacctgctggtggacaacggcaccctcatcgcacaggcactgggcgtgccggagtcggtcattgcgctgacctttgtggcactgggcacctcgctgccggagctggtcactgccatcacctcgctggctaagggccacggtgcgctgtcgctgggcaacgtcatcggtgcaaacgtgttcaatctggtgctggtcagcggcgtgtccgtcacgctggcacccttcagcatcccgcagaactccaccatcgcaggcatgaacgcctcgctggtgatggatatcccggtcatgtttgccgtgatgctgctgctcaccgtgcccgctctgatcaagggcaagctgagccgcccgcagggcattgcactgctgtgcatctatgccgctttctgcgccgtgcagttcagcatctgatccgcaagttaaatagttaaggctgctgcacagggttttgtgcagcagcctttttatgtgggacgattttgaatgcgctccgcgttcgctttgcgcatattcagcggaaagattatttataatttcgcgtttgtcgcactctgcggagtgcgacaaacgctattttcacaggaggggtcgtggaggcaaacggcagctgccgcgcttgtttccacgcggaaacagtcatgcggcgggggcgctgcggcacggaagtcaacatgaccctctcagtcatcgctgcgcgatgccagatttccccctttcgtcgctgcgcgcatcttccccccggagcgggggaagatgtcaccgtaggtgacaaaagggggaatctggcgcgggagcgcctgagagggcgaacaaggctagcgggtgctgcccctcatccggcgctacgcgccaccttcccccggtgggtgaaggcttaagcggtggcggtacagttctcggctgacccgtaaagtttccgggcgtgtccgctctccccttgggggagctggcgcgttagcgcctgagagagtaaaaaagtgggtcagaagcgcccacagacgtttctgacccacaaatagaacgatatttttgttttacagctggcaggcggtatcgtaaccggtgcggatggcgttggagatatccgcagccttaccggcggcatcgccgatggaatacaccgggataccggcagcttccagcgcagcagcgtcaaatgcgttggagcgtgcgcccatggccagcacgatgtaatcgcaggggatggtcacctctgcgccgtccttgttctcgcagacgacggcgtccatgcggaattccttgaccttgtggctggggtactgctccacgccgtaggtcttgtagttttccagcagggtgggcagaatggtggtgctctcgcctgcggcgatcttgtccatcatctcgatgaccgacaccttgcagccgcgggcagccagatactctgcggtctcgcagcctaccatgccgccgccgatgacagccaccgtgccgtacacctgctgctcaccggccagaaccttccaagcgtcggcaacgttcacgctgtcgatgccggggatgcggggtgcggcgctgtgtgcgcccacagcgttgatgacggcctcgaaaccggcgtccttcagctgctctgcggtgcgggtctgacccatgcacaggtgcacaccggcgttgcagacagcgtggatcaggtcctgtgtggcgcggcgcatctcctccttgcggggaggtacgcaggcaatgttcagctggccgcccagagtggtggtcttttcaaacagggtcacgtcatggccgcgcagcgctgccacgcgggcggcttccagaccggcagggccgccgccgaggacggcaatcttctttttctgtgctgcgggctggatgctgcgggtgttctcgtagccattctccgcgttcagcacgcaggagaggaactggcggttctggatggcatcggtgcagcccttgttgcagctgatgcagcggcggatatcgcaggccttcccggcagcgatcttggtgccccagtcggggtctgccagcagcgggcgacccatggcaactatgtcggccatgccgctctcgatgacgcgtgcagccatgtcggcgtccacgatacgacccacggcgctgaccggcacattgacggcttttttgatgtccccggcgatcttgacaaagaagccgtagggctgtacgcccatgggaggaatggtgtcggccatgttgccggtgtggttggcctgggcaacgtggaacatatccacgccgtcctccaccagccactgggcaaactgcacggcgtcggcttcgtcaatgccgcccttgccgcgctgcggagtgacgatggacagcttgtagtcgatgaccatatccggcacagccttgcggatggcgcgggtcagcatacgggcaaagcggacgcggttctccagactgccgccgaacttatcggtgcggtggttcatgcgggtggagcacaggcagccgttcaggcggtcgccgtggatctggatgacgtccacaccggccttctgggcgcgcactgcgcaggcgcacatcttatcgatgatggacatcagcatctcctcgctggcctcatcggtaaagaacatcatgtcgtgatgcaggcgctgacgcatctcgtcaaacttcttctgcataaacaggctgttgatggcgtccacatcgtactccgggtggaagatctggacgcccagcttggtgccgtaggcgtgtacgctgtcggccagtgccttgaaggcagggatctggctgtcgtcaaacagcttgggggtgggagaaaagctgttgatgggcgcaacatcgcccataacgatgtagcccacgccgccctttgccagacgggtgtagaagcccatgtcctgctcgctgatcatgccgtttttctcgtagccggtggtcagcggggggaacatgatgcggtttttaaaggtctgtccgcccacctcgatgggctgcagaattacgttttccatacaaaagcctccttgcagatacgctttgctttacagatttgctttgatgaatgctgcggtcttttcctccacgacggcacgggctgccagcgtggcaaagttgtggccgccgcccgcaatggtgtccacctcgggtgcggtgtacacctgtgcgtaacggctgcaggtgccctcgtccaccagacggtcatcgtcggcgcgcagcagcagcaccgggccgttgtagcccttggcctcggtaaaggggtcggggtgcttggccatctcgtagttaaaggccatcttgtagcacagaccctccaagtcggtgtagtccttgccggtctgcacaacgccgtcggcacgctgtgcgcagccgaaccacatcccggcgcccgggcacagcaggatcaggccgtggggctggatgaccggtgcgcaggaagcggcaatgtagccgcccatgctctggccggagaggaacagcttttcgctgtccacatagggctgctcagcggcccatgcaaagatatcctgtgcatcggtgtgcaggccgtcgaagctcatatcctcgaactcgccgtcgctctcgccgttgccgtagaaatcgaaccgggcgctgccgatgccctgcgctgccaaagcgcgggacaggtgggtgtacatggacttgtagccgctgcagctgccggcaaagccgtgcagatgcaccacaaagggtaccttgccctcggtgtcgggcagggtcacgatgccgcgcagggtgtggccattgcggtttttaaactgaacctgtaaaatcttcatggtttacttgctctcctttgcggcgcggcgagtcttcagctcggtcagcatctcggcagtcttctgcttggtcaggggatagacgaagaacaggatggcaactgcaatgccgtagcccaggaagtagacgccggtgtagctcttccagatagcgtttacaacgcctgcggtctgcacagcgccagcggtaacgttgtagccgatggcacccagcacaaagctggacaggctgccggaaatggcgcttgcaagcttgcggaagaaggagtaggtggagtagacgatgccctcgttgcgctcgccggtctgcagctcatggtagtcgatggcgtcgttgaccatggcccagatcagcacctgcatgccggaagcgcccagatagcagataccgttgatgacgatgaaggccacggggttgtggacggggaagaagaacaggatgccaaacacgatggcggcaaagccggcgcccatgcagcaccactccttcttgccgaacttgttggccagaggctgggtgatggcaaaggacagcacagcgtacagcacgctcagcataccggagacagcctgaattttaacgttgccgaagaagtccttatacaggtaggtgttcaggccgttgaccacggaagcaccgatcatgccggtcaagctgaagaacataacgcccagcagagccttattgtgagagatctccttgagcacgtgcaggtagttcagcttttcgccctgcggacgctcgggcacttccacgcgctccttgcaccatacgcaggtgatctgcaggcacagcaggcccagcagagcgcagatgcaggccagcatcaggaagcggccagccacgggcttgttgtccacatacaggaacagggggccgatcatgaccatgacggtcatgaagatggtgccgccaaggctgcggtagcgggacagtgcggtgcgctggctgacatcatcggtcatcacgctggacagggtgccgaagggcacgttgacgcaggtgtacagtgcctcgtacagaacgtaggtgacgaacatgtaggccagacgcaggccgtagttgatattgcccacattgacaaagccaaggatgcacagcactgccatggggaaggagaaggcgcggatccaagggatgaacttgccgcccttggtggccttgcgggaatccacgatggcaccgatgatggggtcattcacggcgtcccagatcttggtgaccagcagcaggatacccacatggaaggggttgacctgcaggatcagggtgtagaagatcgacagatacatggcgcggtactgctcggtgaagcagcagcccagatcgcccagtgtatagccgatcttgtccttcatggagaagggtcggacggtctttttctggtccattgtgttttatcctccttaaaaacagtgaaaccacgagacttttcgcacaagcctcttttctacgcttgcattatacgttaaatttccatcaatacatatccaaaaaatgattgaaaactatcacaaattgatgtattatgcaattataacagttgtacttttctgttgtgtacaacaaactgtcgcacatgacagtttcacggaggtttttttggtgaactatacagtcaagcgttatttttttgagcagagcgccgtccgggaattttattccggcgcgtattatgatttgtttctggtcatgcggggcagcggcgtgttccggtgcagcgaggtggtgctgcccgcacagcagcagaatctcatcatcttcaagcccggtcagggcggcagactggaatacgccggtgcttacggcccgctggaacttattcgggtgcagctgtccccccagacgctggcgcagctttcggacgcagacaccgaccttgaaaaaagcttcaacgtggtgcccttccggcaggtggctgtgcgcccggacagccagatctatatgctgctgaaaaaccttgctcggaagctgctgatgctcccgcaggagcgcacccagttcggtgcagcggtgttcgagcacggtattctgcaaatgttcgtggtgctggcgctgcgtgcctgcatccatgcggagttccacaccgcatcggtcagccgtcaccacctgatgctggacgaggtgtttttgtttattcaggcgcaccttaccgaggaactgacgctggagcggctggaaaaggagtttttcgtctcccgggaacatattgcccgggaatttaaacgccagaccgggcagacggtgcaccgctatatcgtaaaggcgcgcttggaccgctgctgcaccctcatcgagcaggggctgcccatcaccgaggtgtacaagaccagcggctttggcggctacaaccactttttccgcgcctttaaaaaggagtacggcatgacccccaaggagtacttcagcaccacccggcaggacgcccggggatgaattttgcaaaaactgcactgtccgcgcctgtgaaaaaagccgcccgggaagatctgcagatcctcccgggcggcttgcttatcctatttttttcttttacttgcggcgggtgaggcagttcagcgccatcacaaccagcacgagaaagccgatgaccagcaggataccggtcatgccgatgagcatcatgggcagggtggtcatccaggaagaaagatgaagcataaaggcacctccgttaagccatcagggaaaggatcagtccgccggcaaggacggatgcgatctgcccggaaacgttgacgctgatggaatacatcagcaggaaattctggttgtcctcggccagacccatcttgttgaccacgcgtccgctcatggggaaggccgagatgcctgccgcaccgatcatagggttcagctttttgccctcgggcaggaacaggttcagcagcttggcgaacagcacgccgccagcggtatcaaagataaaggccacaagacccagcgccatgatgagcagggtatccggccggacgaacttgtcggcggtcatctgcccggcaacggtcagacccagcagcagggtgatgaggtttgccagtacgttctgggcggtctcgctcagagagttcagcaccccgcattcccgcagcaggttgccgaacatcaaaaagcccaccagcgccacgctggccggagccaccagaccggcgaccaccgtgaccacaacagggaacaggatcttggtcagctgggtgacattgcctttttcgtagggcatacggatgcggcgctccttctgggtggtcagcagccggatgaccggcggctgcacgatgggcaccagtgccatgtagctgtaagctgccaccataatagcgcccagatactgggatttcagggtgtttgccacaaaaatggcggtggggccgtctgctgcgccgatgaccgcaatggacgcggcgtccttcatatcaaagaagaacccggccagaaacagggtgaaaaagatgccgaactgtgccgctgcgccaaacagcatgagccacggcttttccagcagcgggccaaaatcgatcatggcaccgatgccgatgaacagcagcagcgggaacagctcgttggacatccctgcctcgaacagggcagagatggggccaacggtgtctccctgcgtgatggcgccggatgcgggaagattgaccagaatggcgccgaaccccatgggcagcagcagactgggctccatctttttgacgatggcaaggtaaatgagcagggcaccgatgccccacatgaccaccatctgccatgtcagcgccccgaagtttgaaaagagcgcggcgaatgtgttccagaaattcataatgttttcctgcctccttttgttttgatgctgcggcaagaaaaaaagagacccttgccacagcgtaagatctgtgacaaaagtctcaagcgaacacatgacatcgggcattgctgccgtgatgacgctgccatgcagcggcctgccggaaaaagccttgaccggcgggctgccctttactcccctttatcttttttattgataccagaaactgccgcttctgtcaagggggaaaatgcggttttgcgcaaaaattcaaccgtttaaatcgtcagtccaccaccggtacatccagcccgaactcctgcgggcggaagcggggacagacgttctcggtgatgcagatgaccgaagcagcaagacggctgccgatctcgcaggattctgccagcgttttgccgtaggtcaggccgatgaccgtgccggcaaagaaggcgtcccccgcgccggtggtgtccataacgtccacctttttggcgggcacgatgccgcagctgccgtccgcacaggcgtataccgcgccctgcccgcccatggtcaccaccatgctgggaatgttggcgctgcgcacgttgcccgtgagcacccggcacatctcgtccggggagaggtggtcgtagtcatccgagaacagcagcccggcctcctgctggttgcagatgaaacaatcgatctgctgcaaaaaatcccgccgctccatggcgatgctcatgttggagaccacggcaaacacctttttgccgtactttttggcgtagcgcagggtctgctttaccgtttctttttcgaggtccagctccagtgcaatggaatcgcagtctgcaaagatctcatcgccctgctcctgcagcaggccggtcagcggggtggtgtccggtcgcttggagatggcggcgtgcacatcgccgtcgttgtcaaaaatggccagccatgtgcccatgccgtccggctttttctggataaagcgggtgttgaccttgtgccttgccagcttgtcgatgacgtcctgtcccatgccggtgtcatccaccagacccacaaaggtggggcgcagctctacgttggcgatatcctccaccacgttgcggctcacaccgccgtgtacctgctcgatgcgtccggcgttgcgcccgccggggatataggtggaaaggggatagcccttgatatccacaaaaacagctccgatgactacgatgcccataaacgataaacctttctgacttcagttgattttacctgtattatacaggaagcagacaaaagatgctatccctttgccgttttttgcgaaaaaatatcttccgctaagacccttccgtgaaaaggccaatcgggaaaatccgcagattttcccgattggcaaatataaatagtctttccgctaaaaatgcccagagcgcaacggagggcattctgtatcagcccctgtcacatcgccgtgcgggcggtgcgcaccagatactccatggcctgcaccggatactgcccggcggcagtctcgccggtgagcatcaggctggatgcgccgtccagtacggcgttgtagatgtcgctcacctcggcgcgggtgggtaccgcccgggtgtgcatgctgtccagcatctgggtcaccaccataaagggcacaccggctgcccggcaggcggcggaaagctgcttctggcagcggggcagctcccacaggggcatggcgttgccaaggtcgccccgggcaatgaccacctcgtccaccagcggcaaaaactccggcagcgcctgtacgcccgcaaggttttcaattttggcaagaatcttcagcccgggtgcaccggcctctgccagcgcctgccgcaggttgcggatatccgcagcgccgcgcacaaagggcaacatgaccccggtaacgccgcaaccggcggcgatggcaaggttctccttgtcctcggtggtcagggtgggcatctggatatccgcccccggtgctgccagacttttgcggctttgcagcactccgccccgcactacggtgcacacgagtgcttccggctctgcggtgtccacccgcgccagcagcttgccgtcatccagcagcaactcctgcccgggctgcacgccctgcaccagcgcggcagggcaggggatgccctgcgcgcccagacgcacggtctgtccggcggccagggacagcggctgcggcagacgaccgatgcgtaattccggcccctgcagatcaatgagcagctttttgaccccggctttgcgcagcagcgccagccagtccttgtgcgctgccagcggcccgtgagaaaggttcatgcggatgccggtcataccggcttccaccatctgctgcaaaagctttacatcggcacaggcagggccgatggttccgtaaaaatccataattcctcctgcaattcgtgttttctttctattgtagcatgaccgcgcagcaaaagatagcccagcggcgcacaaaaaaacaccggaagctgatgcaaagcctccggtgtctttttatgatgccttatggggtttactgctacactttgcaccgcctgcgttcagtacaaagcttacagctccctctatttttaaaggttgtacttagtttacagcatttcgggcggttcgtcaagagctttttccagcttttgccggcaaaaaccggaatatcacaacattatcacaactgcagctggtggtagcacgcgccctccatggtcttccagcaggcggtgcttccctccagggtcatgtagctgtgggcagtgttttccttggggatgctcacagagccggggttcaggtaaaggttcccctgcccgaagtctgtccatgcgggcacatgggtgtggccgtggagcagaatgtcccccggggcaaggggcggcagatggttcaggttgaacacatggccgtgggtgacgtagaccagccgctgccccaccggcagcacggcgtaatctgccagcaccgggaaattgagcaccatctggtctacctcggcgtcgcagttgccccgcacacacagcagcttgggcgcaaggctgttcagcagcggaatcacctttttgggggcgtaatcccggggcaggtcgttgcgggggccgtggtagagcaggtctcccagaaacagcaggcggtcggcctgctcccgttcaaaggtctgctgcagctgctgcgcataataataggagccgtgcaggtctgatgcgatcatccatttcatatacaatgccctccctcagagccggtttgccttattgtagcgcctgctgtaaaaatggtcaagtgatcacaaaagtcatacttttgcaccaaaaccccttgacacgccgctgaggatgtggtattctgctaaagttgcagcccgcaaatgcgcaggctgcatatcgcggacagctgccgcgatcataaaaaccgtgtggatttttacagcaacattgctacttttcgccacacaatgacctcacaagggtcattgtgtggcttttttgtgcgccggaaaccggctacaggccggtgctgcgccttccacatttttactttttacagatagcaggtgaaatttttcaatgaacgaaacttttatgaaggagaagccggtgctgccgctgctgctctcgatggcactgcccaacgtggtctccatgctggtgaacagcctctacaacatcgtggacagcctgtttgtggcgcgcatcagcgaggacgccatgaccgcgttaagtctggtgttccccatccagaacttttccaacgccattgccatcggctttggcatcggcatcaacgccatgatcgcgctgtatctgggcgcgggtgaccgcgaaaaggccgagacggccgcaacccacggctttgtgctcagccttgtgcacggcgtggtgatgatggtggtcagcatcaccatcatgcccggctttctgcgccgctttacgcaggacgagacgctgatcgccgccggcatcacctactctaccattgtgttcctgtttttggtcgtgaacatggtctcgctggcctttgaaaagatctttcaggcggtgggccgcatgaaggtgtccatggtcgcgctcatcaccggctgcgtgtgcaatattttgctggacccggtgctcatcttcgggcttgggccggtgcctgccatgggcattgcaggcgcggcactggctaccggcatcggtcaggtgctcagcgtggtggtctaccttgtagtctacctgcgcaccgagctgccggtgcggttgcgccgcagctgtctgcgcccggacgcggcgctggacggcagactgtacgccatcggcattccggccatcctgaatctggcgctgccctcgctgctggtcaccttccttaacggattgctggcggctttttctcagagctatgtggtggtgctgggcatctattataaattgcagacctttttgtatctgcctgccaacggcttcgtgcagggcatgcgccccctcattggctacaactacggcgcgcgggagcacgcccgggtgaaaaaattgttccagctgaccctgctcatgagcgcagccatcatggcggcgggcactgtcatctgtcaggttgcctccgggcagctgatggggctgttcacccagaaccccgaaaccatcgccgccggacagaccgcactgcgcatcatcagcatcggctttgtcatctcggcggtctcaacaaccgtctccggtgcgcttgagggtcttggcaagggcacagaatctctggtcatttcgttgtgccggtatgtcgttttcatcatgccgctggctgcactgctgtgtaactggctgggcgcagacggcgcatggcacgccttctggcttaccgaggtgctggcggcagtggtctccggtatcgtctaccgccgggcggtcacacataaaaaataagaatttctgataggggcgtttcataacgtccctatttttcattgacactacgggaaaagtacggtaaaataattttcgtgttttgacaaaaactgtcagtgcgcaagatattacagaggatgtggaagtatatgatcgagaccattgccgccgtcaatcaggcggtgaacagctttatctggggcatccccgccatggtgtgcatcattggcgtggggctgctgctcagtgtccgcacgggctttttgcagattcgcaaattcccttatgccatccgcaccaccgtgggccggatgttccgcaagcgggacgcctcggacggtgccatgaccccttttcaggcggtgtgcaccgcgctggcgggcacggtgggcaccggcaacattgccggtgtggcgggcgctatcgccatcggcggcccgggtgccgtgttctggatgtggtgctctgcgctgctgggcatgtgcaccaagtttgccgaggtgacgctggccgtgcatttccgggagcgcagcgataccggcgagtgggtgggcggcccgatgtactatattaaaaacggccttggccaccgctggcagtttctggccgtgctgtacgcgctgttcggcgtgctgaccgtgttcggcaccggcaacgcaacgcaggtgaataccatcgtggcagcagtggataccgccctgctggaatacgggctggtaggcggcagctttctgcccaccctcaacctcatcgtgggcatccttgtggcggtgctggtggcgctggtgctgctgggtggtatcaagcgcattggtagcgtgagcgagaagctggtgccctttatggcactgttctacattgtgctgtcggtgggcgtggtggtgctcaacttctcccgcctgccctacgtgctggaatccatcgtggcgggtgcgttcaaccccgctgcctttaccggcggcaccattggcagtctgtttgtcagtatgcaaaagggcgtttcccgcggcatcttttccaacgaggccggtcttggcaccggttctatcgcccatgcctgcgccgataccaaaaagcctgtcaagcagggcatgttcggtatttttgaggtgtttgccgataccatcgtcatctgcaccctgaccgcgctggtcatcctgtgcagcggcacccaggtcagctacggcgcagcggcgggtgctgagctgaccatctccggctttaccaccacctacggcggctgggcgtctatctttactgccgtggcgctgtgctgctttgccttttccaccatcatcggctggggtctgtacggctcccgttttctggtgttcctgtgcaagagcaacaaggtggcgcgccccttctttgtggtgtatgctctggtagccattctgggcgctaccatggatcttggtctgctgtggagcatcgccgacaccttcaacggcctgatgagcatccccaacctcattgcattgctgctgctttccggcacggtggtgcagctgacccgcgccttttttaaatcggaggggtgagcggcagctctgcccatagtggacagaaacgccggaacgcggtatactgagaaaaaacaacggtggctatgcaccacaggaggttctaacgtggaaaactttaacgaactgctgcaaaagtatgcagattttatcgtccgggtgggtgtgaacccgcagccggggcagaccctgatcatcaactgcccgctggagggtgccccgctggcacggctgtgcgtgcgcagcgcctacgaagcaggtgcgcgggacgtgcaggtgaactggcaggatgacgccgttacccgcatccgcatggagctgggcagcgaggacgccctgaccgaccacaagggctggcagctgcgccgctatctggactacgccgagagcgagggcggtgtgtgtgtgctgcacctcatcgcggacgacccggagttgttcgccgggctggatggtgccaagatcagccgggtgaacagcgcgaaccgcagctttatgcagccgtggcgggagtacaccatgaacgacagggtgcagtggtccatcgccgccctgcccgcagagccgtgggcaaagaagatgttcccggagctggacactgccgccgccattgaggcacagtggaagctgatctttgatacctgccgtgtgaccggcggcgacccggtaggggagtggcagaagcatctggaccgcctgaacgagctgggcgcaaagatgaacgccctggatctggaaagcgtgcattttgaaagcgccaacggcaccgacctgaccgtgggtctggccgagcaggcggtgtgggagagcgccggcagcaaaaacgagaagggtgtgcccttcctgcccaacatccccaccgaggaggtgttcaccgcgccccataaggataaggtggacggcatcgtttacggcacaaagccctacgtctttaacggacagctgatcaaaaacttccatgtcaccttcaaggacggcaaggtggtggagcacggcgccgacgagggcgcagacctgctgggtcagctgctggacaccgatgagggcgcacgccacatcggtgaggtggcactggtgcccgcctccagccccatcaaccgcagcggcaagctgttctacaacaccctgtttgacgagaacgctgcctgccacatcgcctttggcgacagctaccccggcaccaccgtgggcggcaccggcctttccaaggaggagctggcagcccgcggcatgaaccactcctccctgcacgaggacgtgatgatcggtgcagaggacagccgcatcaccggtaaatgccgcgacggccgcactgtgccgctgtttgaaaacggcgtctgggtgctgtaaaaagccccaaagggcgcgcaacggcaaaaaaattgcgaaaatgcttgcataaatcgcaagagtatgctatattctagtagtacgatatagtttaacctgaaacgtgggccgcaaggtccgcgtttcttgtttgtttggaggttttttatggcgaagcagtctggcggcaacaccgcgcagagagtggaagcgcttgtccgtcccacggtggaaggcatgggtctgcgcctgtgggatgtggtttttgagaaggaagggccggactggtatcttcgcatcctcatcgaccgggacggtaccatggataccgacacctgtgcagaggtgtcccacgcactggaccccattctggatgaggcagaccccatcgaccagagctattatctggaggtgggcagccccggccttggccgcaagctgacccgcccggagcactatgaggcgctcaagggccagaaggtgcgggcaaagctcatccgccccaacgctgacggcgtgcgggagctgtccggcatcctgaccggccgcgagggcagcaccgtgacgctggagaccgaaaacggccccgtgacctttgaggtgaacgcagcctccggcgtgcagctgtgcgacgacgaggatctgttcaactgagaagaaccgtctctgatggagaaaagagaacaaaatatataggaggaacccgaaaaatgacagcagcgaataaggacttttttgaagcgctctccatgctggagcatgagcgcggcatcaccgcagagtacctgatcgaaaagatcaaggcggctatcatcattgccgtcaagaagaactatgaggtcgaggaggatcacatccgtgtggacatcgaccccgacaccggccgctttgatgtggcactgatccaggatatcgtggcagacgaggactggtacgacgagcacgccgagatcggtgtgaccgaggcacgcaagatccgcagcagctacgaggtgggcgaccgcatcatcaccccgctcaagacccgcgattttggccgtattgccgcccagaccgcaaagcacgtcatccgtcagggcatccgcgaggctgagcgcaaccagcagctcagcgagatccagtcccgcgcacatgacatcgtgcaggccaccgttacccgcgtggataccgagaagggcatcgtagcgctggatctgggcaagggcggcgaggctgttctgccccgcaacgagcaggtgcccggcgaggtgtacaccgagggtgagaccctgcaggtctacatcgtggacgtggtcagcaccgagcgcggcccccgcgtgatgatcagccgcacccatcccggccttgtcaagcgcctgtttgagctggaagtgcccgagatctttgacggcactgtggaggtaaaggccatcagccgcgaggccggtgcccgcaccaagatggctgtctggtccaaggaccccaacgtgaaccctgtttccgcctgcatcggcgagcacggcgcccgtgtggccgctgttgtggaaaagctgggcggcgagaagatcgatatcgtgaagtggagcgaggatatctcggagttcatctccgcagccctgagccccgccaaggtggtcaaggtggagctgctgcccggcgagacccgctcctgccgcgtcaccgtgcccgaccagcagctgagccttgccattggcaacaagggtcagaacgcccgcctgtgcgcccgcctgaccggctacaacattgatatccgtcccgagagcggctactacggcgaggacgaggagcccaagaaggacgcagcagacgctgaataagcccggcaccatctgccgaaggagggaaaccggatggcacaaaaaaagatccctgcccgccagtgcatcggctgcatgaccagccgccccaaaaaggagctggtgcgcgtggtgcgcgcacccagcggggagatcagcatcgatctggtaggcaagaagccgggacgcggcgcatatctctgcccggacccggactgcctgaccaaggcaaaaaagaaaaaggcgctggaacgctgctttgagcagccggttcccgccgaggtatacgacgcgctggctgtacagctggccgcagccgcaaaggaggcagcagccgatggcaaaaaagaataacgcccccgcaaaacccaagctgcccccggaggaggcgctgtatcaggccgtgagcctgtgccgcaaggccggtgcgttgaccatgggctttgatgccgtggaggaagcctgcgtcaaaagcaaggcatggctggtgatgaccgcatcggacatcagccccaagaccttgcagcgtttgaactacgccgtgggggacttggtggacgtgttcaccatgccgctgacacaggataagctggccgatatcagccacaagcccgtggctgtttacgcggtgaccgaccgcaacctcgcaaagctctgcttcgaccgcctgtcggactgcggagcaatcaaaaatgaggaggatatgagcgaatgatcgtaaaatataaagtgagtgactttgcaaaggatctgaacctttctgcaaagaaggtactggacgaactggccgctatgggcagcaccggcaagaagaacagctccaatctggaggagaacgagctgaactacctgctggaaaagttcagcaaggataacagcgtggcaaatctggacgagtttttgaacagcgccaaggctcccaaggaggagcccaaggctgagaagaaggctgaccagaaggccgaaaagaaggctgaaaagaagcccgaggctcccaaggttgacaaaaagccccagcagcccgccgcaaaggccgagcagcccaaggcaaacaataataacaataacggcaagcacggcgacaagaagcccgagcagcataagaagcgcgaggaaaagaccgtttccttcagcgaactggcacgtgagaccggcgcaaaggctaccgcagcccccgcacaggcagtttctgtccgccgcgaggacaatcaggtcaccgtggatacccgcactgtggatatgaacgtggaccgcttcgacgcccgctacgatgatctggcctctaccaagaacaccgagaaccgccgcaagcccactccgcagggcaacaagcagaagttcacccagcgcggccagcgccagcgccagcagttccagaagggcaagcgcgagactgagttcgagcgtctgcagcgcatccagctggagaaggcacgcaacgcccagctgaaggtgatgatccctgacgagatcaccgtgggcgagttggctgcccgcctgaagcagcaggccggtaaggtcattgccaagttcatgcagatgggcgagatgcacgccatcaacgacgtgatcgatttcgacaccgcagctctgctggcagaggaattccacgcaaaggtcgagcacgaggtgcatgtgaccatcgaggagcgcctgttcacgcaggaagaggattcgcaggaggatctggtggagcgtcccccggtggtctgcgttatgggccacgttgaccacggcaagaccagtattctggatgccatccgcaagaccaacgttaccgcaggcgaggccggcggcatcacgcaggccatcggtgcatatcaggtcaaggtcaacgacagcctcatcaccttcctggataccccgggccacgaggcgttcacctccatgcgtgcccgcggtgccaacatgaccgatattgcagttctggtggttgctgccgacgacggcatcatgccccagaccattgagtccatcaaccacgccaaggctgcaaatgtcaagattatcgtggcaatgaacaagatggataagcccaccgcaaaccccgagcgcgtgatggaaggcctgaccaagtacggcatcatcaccgaggactggggcggcgatgtggcctgcatcccggtgtctgccctgaccggcatgggcatcaacgacctgctggagcgcattgctctggaagctgaggtcatggagctgaaggcaaaccccaaccgccgcgccaagggtgcggtcgtcgaggcccgtctggacaagggccagggccccattgccaccattctggtgcagaacggcaccctgcactccggcgacgtcatcattgccggtaccgctgtgggccgcgtgcgcaccatgcgcagcgacaagggtcaactgctcaccgatgccggcccctctacccctgtggagatcaccggcctgaccgcagtgcccgaggcaggcgacctgttcgaggctgttgaggacgagcgtctggcccgtgaactggccgagcagcgcatcgctgccgccaaggagaagcagttctcctccttccagaaggtcacgctggataacctgttcagccagatggcacagaacgacatgaaggagttggccatcgtggtcaaggccgacgtgcagggctctgccgaggctgtgaagcagagtctggagaagatctccaacgacgaggtgcgcgtgcgcgtcatccacgccggtgtcggcgccatcagcaagtccgacgtggatctggccgatgcctccaacgccatcatcatcggcttcaatgtccgcccggacaacgtggccaaggaagaagctgctgccaccaaggtggaaatgcgtatgtaccgcgtcatttacgacgccatcaacgatgtcaccgacgctatgaagggtatgctggcacccaagttccgcgaggtctctctgggcgaactgcaggtgcgtcaggtgtacaagatctccaatgtgggcaccgttgcaggctgccgcgtgaccagcggcaagatcacccgcgacagcaaggtgcgcgtggtgcgtgacggcatcgtcatcgccgaggacgagatcgcatccctgaagcgcttcaaggacgacgctaaggaagtggccgagggctacgagtgcggcgtgaccctggagaagtttgcggacgtcaaggaaggcgacgtgtacgaggccttcaagatggaagagtaccgcgactaagcaaaaaccgaatatataacagcttcccggcagaaaaggcttcccttggacgagggaagctgtcgaacgaagtgagactgatgagggcgtatctttcgcaggtgtggagcgtgcgccctcatccgtcgttttggcagacaaatgccgccttgccccggccggggcaaggctttgggaggctgccggacagaatttggagaaaactatgtctcagaaaaatatgggccgtcttgcgcaggatatgaagcgcgaggtcattgccatcatcggccggctgaaggacccgcggctggagggcggtctgctgaccgtcacccgtctggacgtgacgccggatctggatgtggcaaaagtgtatgtaagcgtgatgggccgcgcagacggccccaagcccgcaatcgaagcgctgaaccgtgccgcaggccatgtgcgcaccgaggtcagcaaaaaaatgcacatccgcaaggcaccccgcttcatctttgtggaggatgacggtgccgcctacgccgcccacatcaacgagctgctgcgcagcctgaacgtgaacggcgaggaagaagcacagcctgctgataccgaacagaccgaggactgactgcctttgcggaaaggatggatcattggatgacagaacaactggatgtgcagcagatggcgcagcgcctgctggctgcggacaacattttgattctgtgccacaaaaacccggacggtgacaccatcggctgcggcagcgccctgtactatgcgctcaaagcgctggaaaaaacaacggcggtgctctgctccgatgccattccgtcccgctacgcctttacgaacccacggctgttcaagggcgagttcgagccccgcaccgtgatcgcggtggacgtggccggtttgcagctgtttggcgaaaataacggtgtgccgcagtttgcacgccatgtagacctgtgcatcgaccaccacgcaggcaacaacggctatgccgattttacccttctggatgccggtgccgctgcggcagcggaactgctgtatcaggtcatcgtggagatgggggtgactatcaccccccacattgccgactgcctgtacaccggcgttgccaccgacaccggctgtttcaagttctcctccaccaccgccaacacccacacggtggcagcaaagcttattgaggccggctgtcatgtggaggagctgaacaccctgctcttcgacaccaagccccgtgcccgcatggaggccgagcgcatcgcccgcaaccatctggaatactatctggatggccgctgcgccctgatctacctgacgagggacgagatccggcagagcggggtagaccccgcagatctggaggaactgaccagtctgcccatcagcatcgagggagtcaaggtgggtctgaccctgcgccagcagcccggcggcagctaccgcatcagcgtgcgcaccgcaaagagtgtggacgcctgtgccatcgcacggcggctgggcggcggcggccacacccgcgcagcgggctgtgagctgctgggcgaccttgaaaacgccaaaaatgcgatccttgcagaggtggaagccgagctggacgcaccgcaggaggaagcataatgcagggcatcctgatcgtagacaagcccatggactggaccagttttgacgtggtggcaaagctgcgcggtgtgctgggcacccgcaagctggggcacagcggtacactggaccccatggccaccggcgttctgccggtgttctgcggcggtgccagcaaggcggtggatctgcagctgaaccacgacaagacctaccgcgccaccctgcgtctgggcgcacgtaccgataccggcgatagcaccggcacggtgctggagactgcccccgtcaccgccggagagaaggaattgctggctgtgctgccgcagtttatcggcccgcagatgcaggtgccgcccatgtactcggcagtcaagattaacggtcagccgctgtataagctggcgcgtgagggcgtgaccgtggaacgcaaggcgcgccctattgaaatttacggcatcgagtacggcggcagtccggaagaaaacgagtatgtgctgacggtgcgctgctccaagggcacctatatccgcaccctgctggaggagatcgccaccgccatggggcagaagggcaccatgagcgctctgcgccgcactgctgccggtctgtacaccgaagcagatgcccacacgctggaagaaattcttgccgcaaaggagcaggggaacgctgcactggaagcactgatgctgccggtggaaagcgtgttcaccccgctgccgctgctgatggtggagccatgggtggagcagcacctgtacaacggctgtcccaccagccgctaccccgcagcagacggacgctaccgggtgcgcaatgccgccgggcagttccttggccttgctaacattaccggcggggtgctccgggtggaaaaactgttcgtggaacgtaattgagcaataaaggaaacaagacccatgcagatcatttctcagtttgccccgctgccgctggcacggcctgaaaaaggcaccgccgtggccatgggctactttgacggcatccatatcggccaccgggcggtgatcgaaggggcggtacaatgggcaaagacccatgatgcagctccggcggtgttcaccttccgcctgccggtggaaaataaaatgaagggcaagcgcctgctctccaccgaggacaagcacgccctgatccacagtcttggggtggagtattacctcaccccggactttgaggcgatcaaggcactgagcccggaggagttcgtgcgcggcatcgtggaaaactgccacgcccgggcgctgttctgtggcgaaaacttcacctttggtgcaaaggctgccggtacgccggagctgctgcgcaccctctgtgcccctcttggggtagaggtagtggtggtgcccatggctcagtttgaggaaaagccggtgtcctccacccgcatccgcaccgcgctggagggtggggacatcccggccgccaacgccatgctgggcatgccctatgccatccgctttgcggtgcagcacggggcagggctggggcacaccctcggggtgcccaccatcaaccagctgtacccgcagggcttccagatgccccgcagcggcatttatatcacccgcacctgcatcaacggggtgtggtatccctcggccaccggtctgggcagccgccctaccgtgaacgatgacgccaccaaggtgacctgtgagacttttatcccgggcttttccggcaacctgtacggcaccgacccggtggtggagttccacgcttacctgagccctagcaaaaagtttgatacgctggaccagctgcgggattgcatcaacgatgccgctcgccgcgcacaggaatattttgcataacgcataaaaagcggaaaaattatttttatttggggtcgagaaacgcctgtgggcgtttttcgaccccttttgtcgtgaaggaaaacagcatttccggcgtctgcgggcagaaaaaaccgcacttcgggcaaaatagacacatttccgtgcaacaatggcaaatgtttgttaaacaattatctatctcatatccttgcaatacacgcagtttttgtttataatagtaactgtacggggcaacgccccgattgtgagcgagactctggttcagaattataacttgagaggagtttttaccatgggtttaggtaagaagacgatcgacgatcagaactactgcggcaagaaggtgcttgtccgctgcgatttcaacgtcccgatgaaggacggtgtcatcaccaacgagaaccgcatcaacgcagcactgcccaccatccagaagctggtcaacgatggcgcaaaggtcatcctgtgcagccacctgggcaagcccaagaacggccccgaggctaagttcagcctggctcccgttgctgtggctctgagcgcaaagctgggcaagaccgttgtgtttgccgacgacgacaacgttgtgggcgagaacgcaaaggctgctgtggctgctatgaacaacggcgacgtcgttctgctgcagaacacccgtttccgcaaggaagagaccaagaacatgcccgagttcagcgaggagctggcttctctggctgatgcttatgtggacgacgccttcggcagctgccaccgtgcacactgctccaccgcaggtgtcaccgactacatcaaggataccgctgtcggctacctgatggagaaggaaatcaagtatctgggcaacgccgtcaacgaccccgtccgtcccttcaccgctattctgggcggtgccaaggttgctgataagctgaacgtcatctccaacctgctggagaaggtcgatactttgattatcggcggcggcatggcttacaccttcgtcaaggctcagggctacgaagtgggcaagagcctgtgcgacgacaccaagctggactactgcaaggaaatgatggcaaaggccaaggagaagggcgtcaagctgctgctgcccgtggatgcagtctgcatcaaggacttccccgatcccatcgatgctcccgtggatgtgaccgtggtgcctgtcaccgcaatccccgctgacatggagggctgcgacatcggccccgagaccatgaagctgtttgctgacgctgtcaaggcttccaagaccgttgtctggaacggccccatgggcgtgttcgagaaccccactctggcagccggtactctggctgttgccaaggctatggctgagagcgatgctaccaccgtcatcggcggcggcgacagcgcagcagctgtgcagcagatgggtctgggcgacaagatgacccacatctccaccggcggcggcgcttctctggagtatctggagggcaaggaactgcccggcatcgcagtcatccagaacgcataatttttccggcatcacaatgggtgcggcggcatttacgccgccgcatcttttctttttgtgcaggcaatttgtaaatagttacgaaggtaaggagaaaataacaatggataaggcaaagcgcaaggctattatcgctggcaactggaagatgaacaagaccgcctccgaggctgctgttctggtggacgagctgatccccgctgtgaaggacgccacctgcgaggtggtcatctgcactccgtttaccgatctggtcaccgctgtggctaagaccaagggcaccaacatccatgtgggcgccgagaacgtccactttgagaagtccggtgctttcaccggtgagatcagcgccgatatgctggtggatctgggcgtggagtacgttatcgttggccactctgagcgccgtcagtactttgcagagaccgaccagaccgtcaacaagcgcacgctggctgctctgaacgccggtctgaaggtcatcctgtgcgtgggcgaaagcctgcagcagcgcgaggagggcgttaccgaggagctggttcgtatgcagaccaagatcgctctgcgtgacgtgaccgccgagcagatggaaaatgttgtcatcgcctacgagcctgtctgggccatcggcaccggcaagaccgctacctccgatcaggcagaggaagtctgcgcacagatccgcaaggtggtgggcgagctgtacggcgaggccgtggccgaggctaccaccgtgcagtacggcggcagcatgaacgccaagaactgcgaggagctgctgagcaagaaggacgtggacggcggcctgatcggcggcgcatccctgaaggctcccgactttgctgtcatcgtcaatgcagccaccaagggctgagcaactgccttttcttaactaagctgtttcagcgcccggctgcgccgttttttcagcgctgagccgggcgctgatctgtttttacagcagccgctcgggtgttatgcaccccgcaggctgcactcccgcaggcagggcgcttagccttgcccgcaacgcgtgataaattcaaaggagattcaattttatggcaaagaaacctgttcttctgtgcatcatggatggcttcggctgggtgccgaacgagacctttggcaacgccgtggtggctgccaagaccccccatctggatgctctgatggcaaagtaccccatgactaccattgatgcttccggcatggctgtcggtctgcccgacggccagatgggcaactccgaggtcggccacaccaacatgggcgcaggccgcatcgtctaccagcagctgaccctcatcaccaagtccatccatgacggtgagatgctcaagaaccctgtgctggtcaagaacatgaaggctgctatcgaggccggtaaggccatccacctgatgggtctggtgggcaccggcggcgtgcacagccatgccgaccactggtttggcgtgctggaaatggcaaagcatctgggtgctaaggaagtctacctgcactgcatcaccgatggccgcgacaccgatccccactccggcaagggcttccttgctgacctgcaggccaagctggatgagctgggcgtgggcaagatcgccagcgtttccggccgttactacgccatggaccgtgataacaactgggatcgcgaggagaaggcctacgctgcctttgtctacggcgagggtgagcacgctgccaatgctgccgaggccatcgaggcttcctacgccgcagacaagaccgatgagttcgtgctgccctgcgtcacctgcgagggtggccgtgtgcaggatggcgataccgtcatctttatgaacttccgccccgaccgtgcccgccagatgacccgcatcttctgcgacgatgcctttaccggcttcgagcgccgcggtggccgcaagcaggtgcactacgtctgcatggccgagtacgatgccaccatgcccaactgcgaggttgcttatcccccggtggagctgaagaacgttctgggcgagtatctgtctgcccacggcaagacccagctgcgcatcgccgagaccgagaagtacgcgcacgtcaccttcttcttcaacggcggcgtggaggctccctacgagggcgaggatcgctgcgtcatccccagccccaaggttgccacctacgacctgaagcccgagatgagtgctcccgaagtcgctgccgagtgcgttaagcgcatcgagagcggcaagtacgatgtggtcatcctgaactttgcaaactgcgatatggtcggccacaccggcgtgttcgaggctgctgtcaaggccgttgaggctgtggatacctgcgtggatcaggtggtcaccgctgtgctgaacgctggcggctgcgccttcatcaccgctgaccacggcaacgccgagaagatgatgaacccggacggcacccccttcaccgcccacaccaccaacgttgtgccctttgtggcagttggctgcggtgatgtgaagctgcgcgagggcggctgcctggccgatatcgcacccaccatgctgccctatatcggcctgcccgtccccgccgagatgaccggcaagagcattatcgtggagtgatgctagacgggataaccggataaataaaacaaaaggctgctgcacattccgtgcggcagcctttttgcataagaaaaatttccgtgaaaagggaatagcggagcgtccgcagacgctccgctattccgaaattaaaaatagattttccgctgatgatggccaaagcgcacgcggaggccattttaaatagttcgcctgcaaaacagcaaagcttactttttcaggtggctgtcccagccgctggaggtggtggcctgcttgtcaggtgtgcaccacatggcctctacgccgtccagcgattccaccagcttctgtccttcttccagcggcatacagaacagagcagtggtcaggcagtctgccatgccggagtccgggcacagcacggtgacgccgttgtagtaggcggccggccacagggtgtccgggtcgatgatgtggtggtagcgcttgccgtccaccacaaagtagcgctggtagtcgccgctggtcaccagtgcaaggtcgctcatgttgatgggcgagccgaagatggagttggtgttggtatacacctccgaggcgttccacgggttctccacaccgccggtccactggctgccgtccggctttgtgccgatggcgcgcaggttgccgcctacgctcaccagtgcgctggtcaggccccgggcttcggcggcgcggcagaccatctccaccgcgtagcccttgcccacgctgcccacgtccagcgacatctccgggtcggacaggtagaccgttttggcctcctcgtcaatgacaaggtcgttgatatcgcagtgctgggcagcagcttccagctcctcctgtgtgggcagggtgttgtcggcctcggaggcgttctgctcagcagcctcgcggtaatcgtgccagatgcccagcacgctgcccatggcaatgttgatcttgccaccggtcaggtcgtacatctgccgcgccagctccagcatggaaaggatgcggtcatctacctgtaccggggctttcccggcgttttcgttgatggtcttaacgttcacaacgccgtcgtagtcgttgtagatatcgtagagctggttgtaggcgatcagatcctgatgaagcgcctgcatctgagtgttgaactcttcctcgctctcgcagtaggcgatgacctgcgtcactgtgtcgaacacatcataaaagatggtggtgtaccgggtcagctcctttttgggcttgcagccgaccagcaggctaaggctcagtaccgccgccagcagtgcagcggtcatgcgggtgatgcggctcttcatacggtctggctctcctttgcggcggtaaaggcggtgtgctcctcctgcaaatgtgccagcaggtctgcaaacatccagttgcggtttgcgggggtgaccaccgccttgagggggatggtcacctgtgcctgccgcatcaggtccagcagggtgtccacgtccttatcgcggaagtttgccagcaccagcgccgggggataggcgcccggctccagtaccagtgttctgggggcttttacctccacctcgcccagcagctgggcgacggtcttgccggcatcggcgggggcaatgggcagcagcttcatgccaaaggcgggtgccatgccctccagcttgccccggtcggcgggggaaaggttccagcccagcgccagcggtaccccggcgttctggttgcgtgcaatgtgtgctttcatctttaaaacctctttcggcagtgttttttcaaaatacactatagtataccataaaacccgtgaaaagaaaatgaaaacccgccggtgcatacaaaaaagctcccccttgcgggggagcggacggagcaggctcagttcatttttttgccgaagaattccacctctttgccgatgaactgcatcagcgcatcgaactggtcgggggtcaggctctgtgcgccatcgcacttggccttggcggggttgttgtgcacctcgatcatcagaccatcggcaccagcagcgaccgcggctttcgccagctccggcaccatccatgcgtggccgcaggcgtggctggggtctaccaccaccggcagatgggtcatcttgtgcagcatgaccacaccggcaaggtccagcgtgttgcgcatactggtctcaaaggtgcggatgccgcgctcgcacaggatgacgttctcgttgccctcggccatgatgtactcggcgctcatcacgaactcttccagcgtgttggcaaggccgcgcttgagcagtaccggctttttctggcggccaacggccttaagcagctcaaagttctgcatattgcgggcacctacctgaatgaggtccacgttttcaaacaggggcaggtgctcggtgttcatgatctcggtcacaatgggcgaacccgtggcgcggcgcgccagcttgagcaggtccagaccctcgctgcgcataccctgaaaggagtagggagaggtgcggggcttgaatgcaccgccgcgcagcagggaagcacccgccgcctttacccgctgggcgcagtaggtgatctgctcctcgctctcaatgctgcagggcccggcgatgactgcaaagttgccaccgccgatcttgacgccctctacgtcgataacgctgtcgtccgggtggaacttgcggttggcctttttgtaaggctcggacacgcggcggcaggtctccaccaccgggtttgccagaacccagctttccgcaatggccttggtatcgccgatcagacccagaatatgggtgtcgctgcccttggaatcgttgatctgcagacccatatcctccagctcgtggcagaactcgcgcacctgtacgtcgggtgcattttgtttgagtacgatgatcatagtattttgtctcctttgcctttttctatcctgtgaaacggcgagggagaccggctcctttgccgcagcttgcagcgtcaaacttcagtactctgaagtgcgtgacgctatgatatcacttcatgaaactgaagtcaagagaaattttgaattttttcagaaaaagtggtagaataaaaaagaaaagaacccgcgcagtcattgttgtgcaatgactgcgcacccaaaggtcgagctttttactgctttccatggggtattacttcccggggaaagagaatctgccggttaccgcgcataagctccccctttcgggggagctggacacgaagcggcctgagagggttcaatagaatcaaagagggaataacaatgggaaaagaagctaaaaccaacgcaatgcgtattctggaacgggaaaaggtggcctataccgcccacgagtacccccacgaggagggggtggcggtggacggcgtgaccgtagctgccagcataggtgaggaccccgcctgtgtttacaagacgctggtaacgcagggcagcagcaaaaactattttgtgttcgtcattccggtggcggcagagctggacttaaaggccgctgcccgcagcgtgggcgaaaagagcgtggcgatgatccatgtggcggatatcaacaaggtcaccggctatgtgcggggcggctgcagcccggtgggcatgaaaaagcagtaccgcaccgtctttgacgaaagcgtgctgacccagcagaaggtctacgtttccggcgggcgcatcggcacgcaggtgtgctgcgccccggcagatctgatccgcgctgcccgcgccgccaccgcaaagatcattttttaaaaatccggcgcgatatctgggatacatcaacacagcctttacataaaatatacctgccgcataagtcatacttaaaaagaaaaaggatggcgaaactgcacaaaactttcgaaagttttttgacggcatgggaacacaagggagaatttgcccaaacgctctttgcaaagcggtttttttgccgtaaactgtatctagtacagggacgatgccccaaaaaacgggcttgcatcgccgcctgaaaaaacgcttgcacaggaaactgcggagggaaacttcaatgatgctgctggtgccgggtcgcatggaatggggtcacattcactgcaatcaggggcatggtgcaaccttgtgcaaaatgcgcggacagaaaaacaggaaataaaggccgtggtacaggtgtaccgcagccttttttgtttgtcggtcttgttggacagttgagaaagagaggctttggaaaatggttcgtaaagtggcagtgatcatgggttcggacagcgattggccggtggtcaagggtgcctgcgcccagctgaaggcactggacatcccctttgaggcgcacatcctttcggcacaccgcacccccgccgaggcagcagcctttgcgaaaagcgcaaaggccaacggctttggcgttatcctgtgcgcagcaggcatggcagcacatctggcaggtgcttttgccgccaacaccactctgccggtcatcggcatccccatgaagggcggcgcgatggatggcttggacgcgttgctggctaccgtgcagatgcccagcggcatcccggtggcaaccgtggcgctgaacggtgccaagaacgccgcatggctggctgctgaaattctggccctgagcgatgacgcactggctgaaaagctggaggctgagcgcgtatccatggcacagcagatcgcagcaaaggaagaaaaactgcagaacgaactgaacgagctgtaaaggagaaccaatgtctgattttgcatatccgctgcatgaggagtgcggcgttttcggcatctacgaccgtgccggtaccgaggatgtggccgcagcggcttattcggccctgtatgcgctgcagcaccgcgggcaggagagctgcggtattgccgtcaacgatgacggtgtgatcaccggccaccgggatctgggtcttgtaaacgaggtgttcaccccggaggtgctggcaaacctgtccactaccacggcacacatggccaccggccatgtgcgctacgccaccgccggcacccgcgtccgcgccaacgcccagcccatgatcgtccggcatggccgcggcaccatggcgctgtgccacaacggcaacctgaccaacgctgtggagctgcgccgccagctggaaaacgagggcgccatcttccacggctcctcggataccgaggtcatctgctacctcatcacccgcaaccgtctgcgcatgggcagcatcgaaactgccatcagcaagaccatggacgtgctggagggcgcatacagccttgtgatcatgtctgccaccaagctcatcgcggtgcgcgacccccggggctaccggcccctgtgcatcggcaccctgcccggcggcggctacgtctttgccagcgagagctgcgcactggatgccaccggcgcttctctgctgcgggatgtggagcccggcgagatcgtagtggtggataccaagaccggcgagctgcgcagcatcaaggatcactgcggccgcccggacacccagatgtgcgtgttcgagttcatctacttcgcccgcccggacagcgtcatcgagggcagctcggtgcacgaggcccgcaagcaggcaggccgcttccttgcacaggagcaccccgtggaggccgatgtggtcatcggcgtgccggattccggcttggatgcagcactgggctactcgcaggagagcggcatcccctacggcatcggctttatcaaaaacaaatacatcggccgtaccttcattcagggcagccagaagcagcgtgagaacagcgtgcgcatcaagctgaacgtggtgtccagcaccgtcaagggcaagcgcgtggtgctggtggatgactccatcgtgcgcggcaccacctctgcccgcatcatcaagctgctgcgggatgccggtgctgccgaggtgcactttatggtctcggcgcctcccttcaagtatccgtgctacttcggcaccgatatcccggaccagaagctgctggtggccaccggccgcacgctggagcagatcaacgaggtcatcggcgccgatacgctgggctacctttccaacgagcacgttgtccagcttgccaaaaacgcaaaatgtggtttctgcaccgcctgctttaccggcgagtatgccgtagagccggaaagcgtgctttctaccgatattcacgaccgtcacctgaacgaccgtcccaaggacgccaaaaagttaggagagtaagaacatggaaaagagctattctgaaagctacgccgcagcaggcgtggacattaccgccggttaccgctctgtggagctgatgaagcagtatgtcgcccgtaccatgaacgagcactgcatcggcggcttgggcggctttggcggcctgtttgagctggactgcaccggctataagcacccggtgctgatctccggcaccgatggtgtgggcaccaagctgaaggtggccatgatcatggacaagcacgacaccattggtatcgactgtgtggctatgtgcgtcaacgatgtcatctgcgccggtgcaaagccgctggtatttttggattacatcgcctgcggccgcaacgtgccggaaaagatcgccaacatcgtcaagggcgtggccgagggctgtgtgcaggccgattgcgctctggtgggcggcgagactgccgagcacccgggcatgatgccggaggatgagtacgatctggccggtttcaccgtgggcgttgtggataaggagaagatcctgaacaacgagaccatggcagccggtgacgtgatccttgccctgccctccaccggtgtgcactccaacggtttctcgctggtgcgcaaggtgttcaacatcgacgccgaccccgatgtgctgttctccacccccgccgagctgggcggcaagacccttggcgaggcgctgctggctcccaccaagatctacgtcaagcccgtgctgaaggtgctggaagaggtgcaggtcaagggtatctcccacatcaccggcggcggcttctacgagaatatcccccgcagcctgaaaaagggttgctgcgcccgcatcaacaaggcagatgtgcgcacccccgccctgttccacctgatgcagaaggtgggcggcatctccgagcacgatatgttcaacaccttcaacatgggcgtgggcatggtgctcaccgtgcccgccgagcaggccgataaggcactggagatcctgcacgccaacggcgagccggaggcttaccgtctgggcgtcatcgcagaaggtgagggcgtggagctgtgctgaacattgccgtgttagtgtccggcggcggcaccaatctgcaggcgctgttggatagcgaaacccggggagagaaccccaatggtaaaattacgctggtagtggcctccaagcccggcgtctttgcgctggaacgcgccgcaaaggccggtgtggagggctgtgtggtgcgccgcaaggactacgccgccagcgaggaatttgacgctgcgctgctggaaacgctgcgggcgcacaagattgatctggtggtactggcaggctttctgtccgtgctgggccccagcgtcatcgcggcttatccgcgccgcatcctgaacgtgcacccggcgctgattccttccttctgcgggccgggaatgtacggcctgcgtccccatgaggctgcactggcccggggctgcaaggtgaccggcgctactgtccactttgtcaacgaggagtgcgacggcgggcctatcctgctgcagaaggccgtggacatcctgcccggcgacacccccgaggtgctgcagaagcgggtgatggagcaggcggaatggaagctgctgcccaaggctgtggctatggtgtgcagtggagagatctgctgaaagcttgcagagcgttgttcttgcctctccctttgggagaggtggcacggcgtaagccgtgacggagagggcgggggagttgcctccgcaaagaggttcgccctctcaggcgctgacgcgccagctcccccaaagggggagccgagagttgctctttgaaaacaaaaatgcaagggagaacaacaatggaaaagatcaacctgaacgagtatctggcctccaacgagtaccccggccgcggcattgctgtggcaatggctccggacggacggcagatgtttatcggctactttatcatgggccgcagcgagaacagccgcaaccgcgtgtttgaccctgtgcccgagcgcggcggcatctgcaccgttgcagccgaccccgcaaagctggaagattccagcctgatcatttataacccggtgctgacccttggcaagacccacatcgtgaccaacggcgaccagaccgataccatctacgacctgatgagtcagggcaagagctttgccgatgccctgcgcacccgcacctttgagccggacggtcccaactacacaccccgcatctccgctgtggtgtacgctgacggcagctaccagatgagcatcctcaagtctgccgacggcaacggcgacagcgtgcagcgctatttctttgattacccccagcccgttgcaggcgagggtcacttcatcagcacctacaagcacaacggcaaccccattcccagctttgagggcgagccgctgcgctttgcctgcccctgcaccattggcgattttgcccacgatatgtggagcagcctgaatctggacaacaaggtgagcctgtttgcccgggtcatcgatctggacaccggcgagagcggcgatatgatctttaataaatatgatccggtgtgcagcgactttgacgaccccgaagagccggagctgctgcccgaggagctggaactgctcaaaaagcttgacgccgaggaagaataagagtaaaccttaggatataaggaggatgcaccaatgaatgaactcgcactgaagtacggctgcaaccccaaccagaagcccagccgcatttatatggaagatggctccgacctgcctgttaccgtgctgaacggcaagcccggctacatcaactttctggatgccctcaactccatccagctggtcaaggaactgaaaaccgcctgcggtctgcccgcagcggcatccttcaagcacgtttccccggcgggtgcagcactgggtctgcccctgaccgaggtggagcgccggatgtaccacattgccccggagaccgagctctccccgctggcttgcgcctatgcccgtgcccgcggcgcagaccggatgtcctcctttggcgactggatcgccctgtccgacatctgcgatgtgcccaccgcaaagctgatccagcacgaagtctctgacggtatcatcgccccgggctacgagccggaggcactggccatcctgtccagcaaaaagaagggcaactacaacgtggtcgccatcgaccccgcttaccagcccgctcccatcgagcataagcaggtgtacggcatcactttcgagcagggccgcaacgagctggtcatcaacgccgacaccatgctgaacaactgggtcaccgagaataagagtgtgaccgaggagcagaagcgcgacctcatcattgcgctcatcaccctgaagtacacccagtccaacagcgtgtgctacacctacaatggtcagaccatcggtgtgggtgccggccagcagagccgcatccactgcacccgtctggccggtcagaaggccgacaactggcagctgcgccacatggacaaggtgctgaacctgcccttccgtgacgatgtggcaaagcccaaccgcgacaacgccattgatgtttacatcggcgataccccggaggatgtcatcggcgatgacgtctgggccgagaccttcacccgccagcccgagccgctgaccgccgaggaaaagaaggcctacctcagcaaggtgaccggtgtttgccttggttcggacgctttcttccccttcggtgacaatatcgagcgcgcccgccgctccggcgtgactgccatcgtgcagcccggcggctccatccgcgaccagcaggtcatcgatacctgcaacaagtacggcatcgccatggccttctgcggcctgcggctgttccatcactgattttcctctgcacaggagcaacgcagcaaaagccttcccccggtcgggggaaggtggcgcgtaagcgccggatgagggcgcacggaagctgcccctcatcagtctgctgcgcagacagcttcccccagagggggaagccttcagaggatgcccgcatacgcgggcagatcaaaaacgggaaggtgaatgatatggctgaaaaaatcttggtagtgggcggcggcggccgcgagcacgccatcatcaaggcactgaaaaagagccccgactgcggcgagatctggtgcgcaccgggcaacggcggcatcagctatgacgctaagtgcaaaaacatcaaggccaccgatgtggataccatggtaggctttgcagtggaagaaaagttcgattacgttgtggtggcgcaggacgacccccttgcactgggcatggtggacgcgctggcaaaggtgggcatctccgcctttggcccggacaaggccgctgcccgcatcgaggcttccaaggtgttctccaaggacctgatgaagaaatacggcatccccaccgcaaagtacgagaccttcgatgaccccgcaaaggttatggactacatccgcgccgagggtaagtacccggtggtcatcaaggcagacggccttgcactgggtaagggcgtgctcatctgcgaaaacgagcagcaggccgccgacggcgttaaggagatcatgctggacaaaaagttcggcgcatccggcaaccatgtggtggtggaggagttcctcaccgggccggaggtcagtgtgctgagctttacggacggcaaggtggtcaagcccatggtctccagcatggaccataagcgcgccaacgaccacgacaccggcctgaacaccggcggcatgggcaccattgcccccaacccctactacaccccggaggtggctgcggagtgcatggaaaagatcttcctgcctaccatccgcgccatgaacgccgagggctgccccttcaagggttgcctgtacttcggcctcatgctcaccccggacggccccaaggtcatcgagtataactgccgcttcggcgaccccgaaacgcaggtggtgctgccgttgctggaaagcgacctgctgcacatcatgcagtcctgcaccgacggcacgctggcacagcaggaagtcaagttctccgatggtgctgcggcctgtgtgattctggcctccggcggctaccctgtggcctacgagaagggcaagcccatctccggccttgtggacggtcagctgcccgacgaggagaacgtgacggtgtaccactccggcactgccatcaccgaggacggccagcttgtgaccaacggcggtcgcgtgctgggcgttaccgccaccggcccgcgcctgaccaacgccctgagccacgcctacgaagcagccgaaaagatcagctttgaaaagctgcacaagcgcagcgatatcggcctgcgtgccctgaaagcgctggcagagaagcagtaattaggaaaagcaccctcatcagtcgcctgcggcgacagcttcccccgaccgggggaaggtggcgagcatgcgagccggatgagggcgcgccttcagaagaattgaatcataagggggaacctacccaatggtctatcgtatttatgtggaaaaaaagtccggctttgatgtcgaggcaaacggtctgaaaaacgaactcaccagcctgctgggcatcaaggatctgaccggtctgcgcctgctgaaccgctacgatgtggaaggcatcgacgaagcactgttcaaccagtgcgtcagcaccgtgttcagcgagccgccggtggataacacctacgcagagctgcccgctgccgagggcgtgtccttcgcggtggagtatctgcccggtcagttcgaccagcgcgcagcttctgctgccgagtgcatccagctcatcagtcagggtgagcgcccgctggtgcgctctgcccgtgtctacctgctggagggcgctctgacccccgagcaggtggccgagatcaaaaagtatgtcatcaaccctgtggaagcccgcgaggcttctctggagaccaaagagaccctgaagatggattaccccgtgcccgctgccgtggcagtgctggagggcttcaaccagctggacgatgctggccttgccaagttcatcgaggaaaagggtctggccatggatctgggggacatcaagttctgtcaggagtacttccgcaccgagcagcgtgatcccaccatcaccgagatcaagatgatcgacacttactggtccgatcactgccgccacaccacctttggcaccattctggacgatgtgcagatcgatgacgccgtggtgcaggaggcctttgaccgctacatggcgatgcgtaccgagctgggccgcgagaacaagccccgctgcatgatggaccttgccaccattggtgccaaggaactgaagaagcagggtatcctgaagaatctggacgagtctgaggagatcaacgcctgcaccgtcaagatcaagtgcgatgtcaacggcaaggacgaggactggctgttcctgttcaagaacgagacccacaaccaccccaccgagatcgagccctttggtggtgctgctacctgcatcggcggtgccatccgcgacccgctgtccggccgcagctacgtctatcaggctatgcgcgtcaccggtgcaggcgacccgctcaagccggtcagcgagaccatgcccggcaagctgccccagcgtaagctggtcaccaccgcagccgccggttactcctcctacggcaaccagatcggtctggctaccggtcaggtggacgagatctaccaccccggctatgtggcaaagcgcatggagatcggcgctgttgtgggcgctacccctgcttcccacgtccgccgcgagtgccccgctcccggcgatgtgatcgtgctgctgggcggccgcaccggccgtgacggcatcggcggcgctaccggctcctccaaggcacacaagctggacagccttgagcactgcggtgccgaggtgcagaagggcaatgcgcccatcgagcgcaagctgcagcgcctgttccgccgcgaggacgcctgcaagatgatcaagcgctgcaacgactttggtgccggcggcgtttccgttgccatcggcgagctggctgatggcctgtacatcgacctgaacaaggtcaccaagaagtacgagggtctggacggcaccgagctggccatcagcgagagccaggagcgtatggctgtggcgcttgccccggaggatgtggacaagttcatcgccattgccaccgaggagaacctcgaggctacccctgtggccaaggtcaccgaggaaaagcgcctgaacatggtgtggaacggcgtttccatcgtgaacatcagccgtgagttcctgaactccaatggtgcagaaaagcaccagaacgtccatgtggaaaagggcagtgtctggcagccccagtgggccggcctgaccttcagccagaagatgaagtccatggtgggcgatttgaacgtctgcagcaagaaggggctttccgagcggttcgactccaccatcggtgcagccaccgtgctcatgccctttggcggtgcataccagctgaccccccagaacgccatggtagcaaagctgccggtggacggcgagaccaccacctgctccggcatggcatggggctataacccctatctgatgagcgccaaccagtatgtgggtgcacggatggctgttattgagagcgtgaccaagctggttgccaccggcttccgctacgaggacgcttacctgaccttccaggagtacttcgagcgtctgggcaacaagcccgagcgctggggcaagccgctggctgccctgctgggcgcactggatgcgcagatcggtctgggcattgcttccatcggcggcaaggacagcatgtccggctcctttgaacagctggatgtgccccccacgctggtgtcctttgccactgccattggcaaggcaagccgcgtagtctccaccgagttcaagaagcccgagagcaccgtggtgctcgtgcgccccatcattgacccggagaccggctgccccaacttcttctccctgaaggccaactataaaatcgtggagaacatgatcgaagaaggcatggtcgcttctgcctgctccgtgggctacggcggcattgccgaggcactgttcaagatgggtctaggcaaccgcatcggcttcaagatgcgtgcggacatgaccacccaccagatgttcgagcccatgtacggctccatcattctggaaatggtgtctgattctcccgccggtatgctgctgggcgagactaccaaggagtacaccttcgagtcctgcggcgaaaagctggatatggccgaactgcaggagatctgggagagcaagctggagcctgtgtatccttaccgcaaggccggccccgctgtggaaaagatcaacggcagcctgaccgctcccgctgcacccaagatcggtgttgcaaagcccaaggtcatcatcccggtgttccccggcaccaactgcgagtacgacaccgccaaggcctttgcccgcgccggtgccgaccccgagattctggtggtgcgcaacctgacccccgccgacgttgccgagagctgtgaggcactggtcaaagccattgacgcaagccagatcgtcatgctgcccggcggcttctccggcggcgacgagccggacggcagcgccaagttcatcgcctccttcttccgcaaccctgcggtcaccgaggctgtgcgccgcctgctgcagcagcgcgacggcctgatgctgggcatctgcaacggcttccaggcactgatcaagctgggtcttgtgccctacggcgatatccgccccatcactgcctgcgaccccaccctgaccttcaacaccatcggccgtcaccagagtatgctggtgcacacccgtgtggcttccaccggcagcccgtggctcagcaagtgcgaggtgggcgagatgcacaccatcgccatcagccacggcgagggccgctttgtggctccgcaggaggtgctggacaccatgctgcgcaacggtcaggtggctacccagtatgtggatctgaccggcgtgcccaccatggatcagagcttcaaccccaacggctcggtgctggctatcgagggcatcaccagcccggacggccgcgtgttcggcaagatgggtcactcggagcgcagcggtgagtacctgtacaagaacgtcaccggcgacaaataccagccgatctttgagggcggcgtggactatttcaaggtttgatggtagaataagaagaaaaccctctccgtcacgcctgcggcgtgccacctcccccgaaagggggaggttttccggtactgaccggcagagcgcaaaaagctccccacctcgggggagctggcgagcgaagcgagactgagagggttattttcaggaggaaaacaaccaatgtcacagcatgatcgctatatcagccctttttccacccgctacgcttccgatgagatgcagtacatcttctcggacgacaacaagttccgcacatggcggcggctgtgggtggcgctggctcgtgccgaaatggatcagggactgaccaatatcaccccggatatggtagctgagctggaagctcatgtggatgatatcaactacgaagtggctatcgagcgggaaaagctggtgcgccacgacgtcatgagccatgtctacgcctacggccagcagtgccccaaggcagccggcatcatccatctgggtgccaccagctgctatgtgggcgacaacaccgatatcatcgtgatgcggcagggccttgagctggtgcgcaaaaagctggtgggtgtgctggcaaagctggcacactttgccaaggagtacaaggatatgccctgcatggcctacacccactgccagcccgcacagcccaccactgtgggcaagcgcgctaccctgtgggccaacgagctggtgatggatctggccgagatcgaccatcgtctggctaccctgcagctgcgcggcgtcaagggcaccaccggcacgcaggcctcctttatggagctgttcaagggcgatgccgacaagatccgcgccgtggatgcttccattgcaaaggagatgggctttgaccccaaggccgttgtgccggtgtccggccagacctacagccgcaaggtggatgcctttatcctgaatgcactggcgggtattggtcagagctgcatgaagtttgccaccgacctgcgcctgctggcaaacttcaaggagatggaggagccctttgagaagaaccagatcggttcttccgctatgccctataagcgcaaccccatgcgctgcgagcgcatctgcgcccttgcccgctacctgatggtggacgtgctgaaccccagctttaccaccggcacccagtggtttgagcgcacgctggacgacagcgccaacaagcgcgtggctatggccgagggcttccttgccactgatgccatcctgaacatcatgctcaacgtcaccgatggtctggtggtgtaccccaaggtggtgcgcagccgcctgatggccgagctgcccttcatggccagcgagaacatcatgatgcaggctgtggaaaagggcggcaaccgtcaggagctgcacgagcgcctgcgccagcacgccatcgccgccggcaagcaggtcaaggaagagggactgcccaacgatatggtggaccgcattgccgcagacccggcctttggcctgacccgcgaggagatcgtggcggggcttgtgccggaaaactttgtgggccgtgcaccccagcaggtggaggagttcatcgccaacgtcctgcagcccatcttcgatgctgaccccgaggatgtggagcagcacgcctccctgagcgtctgataataggatcaattgcaaaaaggagaagcccgcgggcttctcctttttgcgtttgtgccttgcacgattttgtttgtcatgttacactgagggcatcatcaacaaaggaaaaccgcttatgcgtttggataaatatctggccgagactgcccagtgcacccgcagcgaggccaaaaccatgctggcaaaggggcgcgtgcaggtaaacggcgcggtgtgcaaaaaaggggacacccagctgaaggataccgacacggtgacggtggacggcgcgccgctgcgctatcagaagttcgtctacctcatgctcaataagcccgagggggtggtgagcgcctctaccgataagcgggacaccaccgtggtggacctggtaggggacgcctacccccggcgggagctgtttccggccgggcggctggataagaccagcaccggctttgtgctgctgaccgatgacggcggctttgcccacgatatcctgtccccccggcaccatgtttccaagacctacactgtgaccatcgacaccccgctcacgcaggaaatgcgcacaggctttgcggcgggggtcacgctggcagacggcactgctctttcgcccgccgaggtgaccgccctttccccggacggatgcaccgtgcgggtagtgctgcggcagggggtgtaccaccagatcaaacggatgttcggtgtgtacggtgtcggggtgaatgctttgcaccgggaggcgattggcggccttgcactggatgcacagcttgccccggggcagtggcgggagctttctgacgaagaagtggcaaaaattaccagataaaacactgcacttttcacgcgactttcaaaaatgtatcacaatttaccggtaaaataacggtaagaaccacgcaaaaaggcacttttttggcaaaaaatggccccgaaagataatttcaacaagaaagaattattttttttgttgaaatctgttgcaaaagtaaattcttttgtgtaaaatatagattgtaatgcggctaaattgtttaaaatcacaacccatgccgccgcggcttgcacaaacgaggaaaaggggtatccatttatggccaatagagtatttcaaagcgtgatctaccagatgaaggacgcaatcaatcgggtggtcggcgttgtggatgagactggcgctgtcatttcctgctcggagctgaacctgatcggcgaggtgcgcgagggctatatggccgagcgtctgaccgcaggcgaccgctttgtgcgcgacggctatacttaccagcagttctccaacgccaagcataacgattatgccgtgttcgtggagggcgccgacgagactgcagggcagtttgccggtgtgctggccatcagcctgcagagcatcaagcagtaccacgacgaaaagttcgataagtccaactttatcaagaacgtggtgctggacaacatcctgcccggcgatatctacgctaaggcacgggagctgcactttgccaccgatgtttcccgcgtggtgttcatcgtgcgggtgatcagcggcggcgatatctctgcctacgatgtggtcagcagcctgttccccgataagcagaaggactttgtgttcaatatcagcgagaccgacaccgtgctggtcaaggagatccgcaagggcatcgaccgcaccgatatggaaaagctggctgccagcattgtggataccctctccggcgaacactacatcaaggccgtggtcggcattggcacccctattgccaacgtgaaggatctggctacctcttttaaggaagctcagatcgccatggaagtgagcaaggtgttcgataccgaaaagcagatcatccgctacgataatctgggcattgctcgtctgatctaccagctgcctaccaccgtgtgcgagatgttcctgcgcgaggtgttcaagcagggcagcattgaaagcctggatcaggagaccctgttcaccatccagcgcttcttcgagaacaacctgaatgtgtccgagaccagccgcggcctgtttgtgcaccgcaatacgctggtgtatcgtctggaaaagatcaaaaagctgaccggtctggatctgcgtgagttcgacgacgctatcgtctttaaggtagcgctgatggtaaagaagtacctgtccaacaacccggccaaatactgatattttgctgtgcgggttttgccccgccggcgctgaaccggccgctcgaaaccgatgctggccggttctttttgcagtgttagctgcagacgggctgtcttgaccgtcaaaaatcttgatgtcaggagctaatacgattccatgatcgattttgaacacgtttccaaagaatataaaaagggtggccgccttgcactggaggatatcaacttccatgtggatgaaggcgagttcgtctttctgctgggtcactccggcgcaggcaaatccaccctgctcaagttgatcctgcgggagactctgcctacctccggtaaggtgaccgtgctgggcaaggacgtagccaagctgcgccgccacaagatcccttacctgcgccgtcagatgggcatcatctttcaggatttccggctgatccccagcatgaccgtgtacgagaacgtggcctttgccatgcatgtgctcaatgtgccccgcaaggagatccgtccccgcgtggagtacattctggagctggtgcatctggaggataaggccaagtgctacccggataccctttccggcggcgagcagcagcgtgtggctgtggcgcgtgcgctggtgcataaccccaagctggtcatcgcggacgagcccaccggcaacattgacccggagctgagcctggaaatgatgcagctgctggagcgggtgagcaaaatgggaatcacggtgctggtggttacccacgagcacgagctggtgcaccgcttccatcagcgtgtggttaccctgagccatggccgcatcgtctcggacgtgcccgcagaccccgtggccgccgccgaggatgatctttcgttggatgttgccgcctttgatgcggacgatgcgtccgctgccaaaaaggaggtggctgccgtatgatgcgaccctctaccttctttttccttacccggcgcggtgtgcgcaacttgggcaagcactgggccatgaccattgcctgcatcgcttccctgagcgtgtgtatgaccctgaatatctttgccagtctggccgaggtgaacgtgggcagcatggtggcctatctgggcagccagaacgagacggtggtctatctggaccccgaatgtgatgatgccaccgccgcgcaggtaggcgagaccctttcggctatgccgggggtcagcggggtgcagtacgtttccaagcaggacgtgctcgacacctaccgcggttatatgcaggattattcctccctgtgggatgaatttgagaccgacaacccctttaaggccaactaccgggtcaccctgagcgacctgacccagatggagcgcatgagcgtgaagatgcaggccatcccgggcgttgtcagcgttactgctccggtggagatgaccaatgtctttgtggagatccagaaggcagtcaccaagggtggccgcatgatcgtgatggtgctgatggtggtcagcatcatcacggtgggcagcaccatccgtctgagcgtttttgcgcgccgccgcgagatcgagatcatgaagtatgtgggtgctaccaaccgcatggtcaccctgcctttctttgtggagggcctgaccatgggcctgatctccggcattctgaccgcagcggtcagccttggctgttacagttatgtggtcaacgccgctggcggcttgggcggcatctggcagatgctcatgggccgtgcactggtgccggtggcaaacgtgctgccgaccatcgtggtaacaagcctgctcagcggcgctatcgtaggcggcgtgggcagtatgttctctatccgcaagcatttgaatgtgtgaccgaaaggagccgcgttttatgagtaaagcaatgcacgcaaagcccttccggctcacaggcccttatactggtcggcacgcccggccggaaagcccccgcagcaagctgatccgtgcggtcagccttgggctggcctgtgtctgcctgctgctgacagccacggtgtatccggcttcagctgctactaataataccagcatggccagtttgcagaccaagctggataagctttcccagtccatcaaccagcacaaaaaggagctgtcggatgccaaaaagaaggagtctgccgccaaggcgctggaaagcgagctgaaggaacgggtcaccgtcctgcaggatcagatcagcgtgctgggcggtcagatcgccgcagtgcagaacagcatcggcgagaaggaacagcagatcggtgtgatgcagacccagatcacggacaagcagacccagatcgagcaaaagcagaacgagattgatgaccagtgggacgattttaaaaagcacatggctgccatgcaggagctgcgggacggcggcagtgtggccatgctcggtgcggtgaatgacctgtatgagctgcttaccttcaatgaggtgatgcaggatatctctatcaaggacaccgagatcatgaacaacatgaagtccgccaagcaggggctggaggacgataaggccgcactggaagagcagaaggctggtctggaagccgaaaaggcagagctgcaaagccagaagagtgaactggacagccagaacgcccagatgaagggcaagcagagcgaactgaacaacagcatctctgcggcaaagctctccgctgccgaggcacaggcagcgcagcagaaggcgcaggcggccatcgaatccgacgagttgaactatgaggccgtgaaaaaggagatccagaagctgatcgcagcagcctctgccagcaagccgcagctgagctttagcggttttgcctgcccgctgaagagttacagccgcatctccagcgagtacggctggcgcaagaacccggtctccggcgtgaacaagctccatgccggtaccgactttgcggcggccggcggcacgcctatctacgcagccgccagcggctatgtgcaggtggcaggctggtctaccggcggctatggcaactacgttatcatctaccacggcaaaatgtccgatggtaatacctataccaccctgtacgcgcacatgcgctcggtggctaccagtgcaggcaagtatgtgaagcagggcgaactgatcggttatgtgggcaccactggcaattccactggcaaccacctgcatctggaggtgtggaagggcggctctaaggccaacgctgtgaacccccggagctgcatccccattccccacaactaataagcaaggcaaggagtctggttgatctatgaacgaacaaaaacgcaagcgcgtgctgcgcatcggctgcctggttctggcaggggtgtttgtactctcgctgctgggcagcatctttatgatgttgccgctctgaccgggaggaaaaaaccatgaaccgtaaaatttctttgggtatggcagtcaccatcgtgatccttgccatgactgtgaccttttccatcacgatgctcatcgccatgcgtctgttcgacagcacggtcaacagcgtaaaagaaaaggaaagtatgtacaacaagatcgctgaggtggaccgctacgtccgcagcaacgattactacaccattgatgaggccaccctgtacgaccgcctgaccgccggttatctgctgggcacgggcgacaagtacgcccgctactacactgccaacgcctacaccgagctgatgaacatccagagcggcaagattttgggcatcggcgtggagcttggcatcgaccagaccggctacgctaaggtgacccgtgtttacgatggctctcccgcacaggaagcaggcatcgccgtgggcgactacatcaccaccgtgggcgataccgatgtcaagagcctgtccggcgcagacgccgtgtacaaagccttgcagggcgaggccggcactaccgttaccgtgacatggctggacagtgctgcggccagtaaaaccgctgagctgacccattccggctacaccagcaccaccgtggactaccagttgctggacaatgtgggctatatccgcattcgtcagttcgacggcactacgcccagcgagctggactatgccctgcgcaccctgaccgcaaacggcgcagccagtctggtattcgacctgcgggacaatggcggcggcattctggaagatgctgtcaactgcattgacctgatcgccccggagggcacggtggcctacgccgaggataaaaacggcaaccgcaccgtcatcggcagcagcgatgccgaaagtgccgtcagtctgccgatggtctgcctggtcaacggcaacaccgccagcgcagccgagttgttcgcagccaccctgcgcaccatgaacggtgcccgtctggtgggtaccaccaccatgggcaagggcaccattcagagcagcccgcagcgcctgtcggacggcagtgccgtggtcatcacggtggcaaagctggtctgcggcgacggcagctgctttgatggcaccggcctgaccgtggatgtggagcgcgccctgagcgcagaggaagcaacgaacttctacgactacaccccccagaccgacccgcaggtgcagcgcgctgtcagcgctgcccagcagctgagcggcaccactacgctggcaggcgcaagctctgccgcagcagcggacagcgctgcttcctctgccgcagcagaggataccgcccccgcagagactgcggaaggagagcccgccgagggtgagactgctgcgtctgagccggaaacggctgcgagcgcagcggagtgaaccctgcaatcctgaaccataaacaccaaaaaggctgctgcgttctgcaacagcctttttctgagaaaggaattgaccctatgccggaactgaccgacctttctgtgatccgtgccctgtgcgaaaaatacgattttgcactttccaagggctttgggcagaactttatcatcaacccgggcatccccacaaaaatcgtggatgccagcggggtagacaagcgctacggtgtcattgagatcggccccggcatcggcgtgctgaccaaggaactggccaagcgtgccgccaaggtggtgtccatcgaggtggacgagcgtctgccgcccctgctggccgagaccatggccggtgtggacaacttcaagctggtgctgcaggatgtgctgaaggtggacctgaaagccctcattgccgaggagttcccgggaatgccggtggcagtgtgcgcaaacctgccctattacatcaccagccccatcgtgatgaagctgctgggcgaccgcctgcccatcgagagcctgaccgtcatggtgcagaaggaggccgccgaccgtctggcagctgtgcccggcacccgcgcctccagcgccatcagctgcgcggtgaactactacgccacctccaagctgatgttcaccgccgcaccgggcagcttttatcctgcccccaaggtgaccagcgccgtggtgcgcatggacatccgtcccacccccgctgtgcaggtggaggacgaggcgggctactttgcgctggtgcgcgccgcctttggccagcgccgcaagaccgctgccaatgccattgcaggcgggctgaacctgcccaaggaaaaggtcattgctgccatcgaatccgcaggctttgatgcccgcatccgcccggaggcactgacgctggaggactttgccaagatccagcaggcactgggctgagcaaaaaaacagtatagtcggtgggcgatggctcactgaaaaaagattgcaaaaaaaaaccggaaccttttcagagccgcaagggctcaaaaggttccggttttctgttttttaatggttatgcggcagcattcgccttactcagaaggggaagatggtgccgtcctccttcacggtgcaggcgttcagggcgaccttaccgtgaatgtctgcaccgtctgcaagggtgttaacgtttgctgcggaggaggtgccgaaggccttgaactgccagccgtttgcagaggcgctgtcctctgctgcccaaactgcggcagacaacgacggacggactgcggcattgccaagaagggtattattttgtgaaatgctgggacgaatgcgcaggcgtaccggacttttttgcgtcctcgcgcgccgggcgaaaaagaaatttcttttcatagttctgcggtgggtaggacgaaactttgtcaaatgcgtggaatattgcagaaaaatttgtgaaaggcaaccaatgaatatcccctaaacgtgttgatattgagaaaaaagacggaggattgtttacaaaagaatgacaggctggtatactttatagcggtagatccctatgagatccgcaaagaaacaagaaaggaaataccgaaccgtgaataccgccgcaccgcacgccctgaaaaaacgattgctgaccttggcactgagccttgctttcctgcttacctgtctgcccgctgcactggcagtggatctgaatgtggacgcaggcttctacttcaagcagagccggggcggcacctgtacgctggcctccgcagccatgatgctgcgccgccgcgcctactttgacgggctgagcgactggacgaacgtgaccgagaacagtgtgcgctccacagcatgggccaacggccttgcgcacagctttacatataaggagatgcaggtgggctacgccaccctgccttccgggctacaaagcaaaacggcggtgctgatctccctgctggagcagcacccggagggcatcgtcctctacgaccgcacccagccccatgcggtgctgctgactgactacaccaacggtattttctattgctccgacccggcggggaacatcggctacggccgcatccccattaccagctccagcgtgtccattgcaagagcgtcctgttactggtacgtcactgcagatcacaacagcgtggcggcacaggccgatggtctgcggctggagggcgtgcgctacccggtgaatatccgcaccggcagcggcatgacgctgaccggtacggctaacagcgctactggcactactttgaccagtgtacaggtggccattctggatgcggcagatcagaccgtgcagagtgcggcggcgcaggcaaacgccgccgctttctctctgaacacgctggacagtcagatccgcttcggggagctgccggagggcagctacagctatatggtgctggtgaccgactctacgggcgagagcctgtgctttgcctcggacttcacggtgtccggcagcgcaagcagcacccagacctactggtcggtcaaggatgccgagggtaccaagctgcagcagacggtccagcagatggagaccacggtagaaactgctgctgagaccaccgtaagctggtttgcaaagctgttcgactgataaaaagaaataatccagggctgctgcacattactttgtgcagcagccctgtttgcatcacaataacagccgcttttcgttacgacccctttccgtgaaaaagtggttcagaaccgcccgcaggcggttctgaaccacaaaatttaaaatgatttttccgcggctattacctccgcagttctgtgccggggtaatagtgcgccagaatggcgcggtagtctgcgccctgctctgccagtgcctttgcaccccactggctcatgcctacgccgtggccgtagccccttgtggtaaaggagaaggtgccgctctggcagaccaccgtaaagcaggcgctgcgcagccccagcgctttgcgcaaggtggtaccctgcaccgtctgcccgcagaccggcaggctgtccacatagccggaagaggtgagcaccggcgtgccaaaccactgcgcctgctgcgaaaggtcggcggcaatgcccagacgctcagctagcagctgctgtaactgggcggcggaaaggttcagggtatattcgtagttgtcggcggcggtgtcggtgctgctgtccaccggcacaagatagggcagggcagtgccccagacgttctcgctggcctcggtgcggccattggacatggcaaagtagcttgtcccggcgggggcatcctcgtaatatagcacctgcgtctgtactgcatccaccagcgcagaaagccgggcgtagttggccgcgtatgcggtgccccagtaactgtgcagcactgcatcggtcaggcagccctgccgccgggcggggtctgcggtgaaccatgcgccgttttccccggtgctgtggtcccggcggtacagagcgtagctgtgcgccgccactgcctgcgccttcagcgcttcatccggccagctgaccggcatctcggcggcaactgccccaatcaggtatttccgcagcggcagcgttatcgtctgcccggtgctctgatccgtaaagcaaacggtatcggctgtgtcagcaggggagggagcccctctgctgctttcttccgaggtgacagaggccgcctctgctgcggacggcgcagtgccctgcacaacaagcgccatacaggcaagacggtaggcagcacacggcaacgcgcagcccagcaccagcagaacggtgcacagcagcaaaaaggaacgtttcatactagatctcctcccggaacgcaagctttgggtacatcatacgcccggcagcgtgcaaaccggcaggaaatgcgcagggaagccccagtatttttgcgctttgcggtgagaagtgtacacttagcgcttgaatttacttcataaaagcgatattataaaagtatgtccatcagagagtaggatggactggatcggaaagtataagaagtaagagacggaaaggagcactcctatgaactttgcacacgcagaagtggcaacgctggacccgacgaccatgcgtaccctgtgcgaggagtacatcgcaaacaactacatcgacccggagaccagcgagcggctgggggtcaagcgcggcctgcgcaacccggatggcaccggcgtgctggccggcctgaccaacgtctgtgacgttgtgggctacaaaaaggatcaggagggtcatgtgatccccacccccggcaagctgatctaccggggcgtcaacatcaacgagatcgtggacgaggcttaccgcaacgaccgcttcgtgtttgaggaagtgatctggctgctgttgttcggcagcctgcccacccgggagcagctggacgatttctgcgagatcttggcagaatcccgcgccctgccggacggcttcatggacaccatgaacgccccctcgcccaatatcatgaacaagttgcagcgctgcgtgctgggcctgtactcctacgatgaccgcgccgaggatctgagccttgagaacatcctgaaccagagcatcaacctgattgccagcatgcccaccatgatggtgaacgcttaccagatgaagcgccgctactacgataaacagagcatgttcttccacctgcccaagcccggtcagagcacggcagaacacatcctcagcacctaccgcccggatcagaagttcacccacgaggaggcaaagctgctggatatgtgcctgctggtccacgcagaccacggcggcggcaactgctccacctttaccacccgtgtgctgtcctcctccggtacggacacctactcggccatctctgcggccatcggtgccctgaaaggccccaagcacggcggtgcaaacctgatggtcaaccgccagctgcaggatatcctcaagcacgtcgagaacccggaggatgacgatgaggtgcgcgagtatctgcgccgcatcctgcgcaagcaggcgggcgacggctccggcctgatctacggcatgggtcatgcggtttacaccatcagcgatccccgtgaggtcattctgaagcagcgcgcaaagcatctggcctacgaaaagggctttgaggaagagtacaatatgctgtgcagcatcgagcggctggcacccggcatctttgctgaggaaaagggcagctccaagccggtgtgcgccaacgtggacctgttcagtggcctgatctacaatatgctgggtatctctgaggatctgtacaccccgctgttcgccatcgcccgtgtgccgggctggtgcgcacaccgggtagaagaggtgatctttgccaaccgtatcatccgcccggcctacaagtatctgggcgtgcgccagaaatataagcccatcgaggagcgttaatggaaccgttagagttaattattgtcctgctctgcgtactgcttggccttggccgcggcgcagaccttgcctttgccaccgacgcggccaccggtctgtgtaccgcaggtgcggtgtggtggcggtatctcgtcttgggcgctgtggtgctggccgcagtgctggccgggcgcagccgcccgctgcccccggagccgctgcgcagccgccgcccggcggcaggcgtgctggcctttgccggggcagtgtgtatgctggctgccggtgcagcacagtttgtgctggccgccggtacggtaagcacctttgtgcgcattctgctggaggtggcctgtgccgtgtggctgagcaaccttgggcgcagctggctgcgccgggacggctggaaaacgcccaccggcggtctgccggtggccattgcgggcagtgcgttgttctactggaatgtgctgatgcgctttatggagaacagttccagctggcaccgggtacagcccacggcagcagtctggcaggagctggcggcgttgctgcttctggcggcgctggcgcgcacactgtatctgccccggccggaaaatggccgtgccctgcacgcagcggcgcttgcagccttttgcctgtgcctgtgctgggagctgccccgggtgctcttgctattggcagcaggctttggcggcggcatggcggcagtgctgccggagctgctttccggccttgcactgtgctgcatcggcggtatggggcttgtctgtgccggaaaggaaaaagctggaaataactgaccaaaacggcttgatacccttggtgcaattgaacaaaagctttgtgacagggtgcataaaatcatacaaaagccaaaaaagataaaattatgttgttaattttttagcagacacttgaaagtttgccggttttggtctacaataaagataccgtgatttatccgattatgggtaaaataattaggaggtactattacaatggctgttagagttgctatcaatggtttcggtcgtattggccgtctggctttccgtcagatgtttgatgctgagggttacgaggtcgtcgcaatcaacgacctgaccagccccaagatgctggctcacctgctgaagtacgatactgctcagggctctttctgcggcaagatcggcgagggcaagcacactgtcgagtccaccgaggattccatcattgttgacggcaaggagatcaagatctacgctgttaaggatgcaaaggatgctccttggggcgagctgaacgttgacgtcgttctggagtgcaccggcttctacaccagcaaggagaagagcatggctcacatccaggctggcgcaaagaaggtcgttatctctgctcccgcaggcaacgatctgaagaccatcgtctactccgtcaacgagaagaccctgaccgctgaggatcaggtcatctccgctgcttcctgcaccaccaactgcctggctcccatggccaacaccctgaacaagacctatcccatcgtttccggtatcatgaccaccgttcatgcttacaccggcgaccagatgatcctggacggtcctcagcgcaagggcgatctgcgccgtgctcgtgctggcgcacagaacatcgtccccaacaccaccggtgctgctaaggccatcggtctggtcatccctgagctgaacggcaagctgatcggctctgctcagcgtgtgcctgttcccaccggctccaccaccattctggttgctgtcgtcaagggcaaggacgtcaccaaggaagctatcaacgctgctatgaaggctgctgcttctgagtccttcggctacaacgaggatcagatcgtttcttccgacgttatcggcatgcgttacggctctctgttcgacgctacccagaccatggtcgctaagatcgacgacgacacctatcaggttcaggtcgtgtcttggtacgacaacgagaactcctacacctctcagatggtccgtaccattaagtacttcgctgagaactgctaatcacagctctacgctcaaaagtgcttgaagtgccgtgctgagtaacagctggtaccggctttgctggtacgaacatgcgatgattggtacgacaacaggatattgagttctacacccttccttttgcgggtctccgtgagaggaagggtgttttttatcttccagcagggggaaaatcccaagaaaggatgatttactccaagaaatgtgctatactgaactcacagtgacccggagccgatgcactatgcggatgacaatgctgttgtgcgggtagcatcatgcaatgggggaaagcatatatacttatacactaatgaaagttcacttttgggaacgaggtaagcaagaatgggaaagtattttgggaccgatggcttccgtggtgaagctggtattgatctgactgccgaccatgcctacaaggttggtcgctttttgggctggtattacaatatgctccgcgagcgcaatggcaacaacgagcctgcacgcattgtaatcggcaaagacacccgccgcagctcctatatgttcgaatacagtctggtcgcaggactgaccgcctccggagcagacgcttacctgctgcatgtcactactacgcccagtgtggcttacatcgctcgcgtggatgactttgattgcggcatcatgatctctgccagccacaacccgtactatgataacggtatcaagctgatcgattgctacggtgagaagatgcccgaggagaccctgctgctggtggaggactacatcgacggcaaactccatgtgtttgacaaggactggccggagctgccctttgcacaccgggagcacatcggctgcacggtggactatgtggcaggccgtaaccgctacatgggctacctgatctctctgggtatctactccttcaagggcattaaggtcggtctggactgcgccaacggtgcaagctggaatattgctaagtctgtttttgatgctctgggtgcggatacctatgtcatcaacaacaagccgaacggcctgaacatcaacaacaacgctggctctactcatattgagggtctgcagaagttcgtggtagagaacggtctggacgttggctttgcctttgatggcgatgctgaccgctgcctgtgtgtggacgagaagggcaatgtcgtcaccggtgaccacattttgtatatctatggctgctacatgaaggagcacggcgagctgatgaacaacaccgtggtcaccacggtcatgtccaactttggtctgtacaaggcttttgacgagcagggcatcggctacgcaaagaccgccgtaggcgacaagtacgtttacgagtacatggctaagaacggctgccgtattggcggtgagcagagcggtcatattatcttcagcaagtacgccagcaccggcgatggtatcctgaccagcctgaagatgatggaggtcatgctggccaaaaaactgcccatgagcaagctggctgagccgctgaaaatctacccgcaggtactggagaatgtccgcgtcaccgataaaaaggctgcacagaacgacccggcagtgcaggaggcagtcaaggcagttgcagaagcgctgggcgataccggacgtattctggttcgtgagtccggcactgagccccttgtccgcgtgatggtggaggctcccgaccacgacacctgccagaaatatgtctctcaggtcgtggaggtcatcaagagcaagggttacgccgtctgaggctgagtgctgcggcggatgttgcccgtgcaccaaaatgcgggcagcagacgcactgcacagcgcgattctgcatctttttgttgacaaacccgcattttttgcgtatgatagaagcaacactgaaaattgtgtcaaattggctgtgaagagaagagtacgcaccgtctgcgcctgacagaaagcccgaaggatggaaccgggcaggccgcgcggcgccgaagatggtcttggagccgcgcaggtgaacaatgagcctgcgacggggtgcgcccgttaccgcgcaaaggccggtttttgccggctaaaggctgcgtccgcaagggcgaagcgaagcaaggtggtaccacgaaggttcagcgctctcgtccttgtccggttatacccggcagggcgggagcgctttttgcttgcagaagaagctgcagaaccaaaagaaaggaagatagaaccccatgagcgaacacaagacattttatatcaccacccccatctattaccccagcgataagctgcacatcggccacagctacaccaccgtggcctgcgatgcgctggcccgtttcaagcggatgcagggctacgacgtcatgttcctgaccggcaccgatgagcacggccagaagatccaggataaggctgccgatgctggcgtcacccccaaagagtatgtggacaagatcgtggccaccgtcaaggatctgtggaagctgctggatgtcagctacgaccgctttatccgcaccaccgatgattaccacatggaaagctgccagaagatcttcaccaagctgtacgagcagggcgatatctacaagggcgagtacatcggccactactgcaagccctgcgagagcttctggacggacagccagttggtggacggcaagtgcccggactgcggccgcgaggtctacgatgcccacgaggaggcctacttcttcaagaccagcaagtacgctgaccgtctgctgaagctctacgaggagaatccccagttcatccagcccgagagccgcaagaacgagatgatcgccttcatcaagcagggcctgcaggacacctgcgtgtcccgcacctcggtcaagtggggcattcccgtgcccttcgaccccaagcacaccatgtatgtgtgggtggacgccctgagcaactatatctccgcactgggctacggcaacgacacctaccacgactacgataagttttggccggcagacctgcacatggtgggcaaggaaattttgcgtttccacaccatcctgtggcctgccatgctgatggcactggatctgccgctgcccaagcgtgtgttcggccacggctggctgctgatgaacggcggcaagatgtccaagtctgtgggcaacgtggtagaccccgttatcctgtgcgatcgctacggcgtggacgccatccgctatttcctgctgcgcgagatccccttcggcaacgacggtatgttcaccaacgaggcactgatcaaccgcatcaacagtgatctggccaacgacttgggcaacctgctcagccgcaccgtggccatgtgcgaaaagtacttcggcggcaccgtgcataatgtggccggtaccgaggccatcgacaccgagctggagaccatggtcaacgagctgaccgccaaggtcaccgccgacatggacgatctgactatcccgcaggcgctgatggagatctttgcggtcatccagcgcgccaacaagtatatcgacgagactgcaccctgggccctggcaaaggacgaagccaacaagcagcgtctggagagtgcgctgtaccacctgtgcgaggcactgcgcgtgtgcggcatcctgctgaatgcctacctgcccaccactgcacccaagatgatggaacagctgggtctggacgcttccgcactggatctgaccaagaccacctacggtgcacagcagacctataccgtgcacaagggcgaggcactgttcccccgcattgacgtggccaaggagatcgcccacctgaaggaagaggacgagaagcgcaaggctgctgccgctgctgccaacaaagccaaggaggaagccgagaagaaggctgccgcccccgcagaggagagcaccgtggacttcacccatgaggaagagatcgactttgacaccttctgcaaggtggagctgcgcgtggccgaggtgcgcgcctgcgagaacctgaaggagagcaagaagctgctgcacctcaccgtctttgacggcgagcgggagcgctgcatcctgtccggcattgccaagtggttcaagccggaggatctcattggcaaaaagctgggcatcgtgtgcaatctggcaccccgtcccatgctcaagggcaagtacgtcagcgagggcatgatcttcgctgccgacaccgccgacggcggctgctccattgcattctacggcgacgatacccccgtgggcagccgtatccattaagtgaggagcatcatgtctgataatacagccgttcgtgcggcaaagctggataagatcttcggcacgccggtgtgcgccgtgctgctggctattttctgtaatgtcctgtggggctcggcctttccgttcatcaagctgggctaccgtctgttctccatcgactccggcaacaccgcctccatcttctgttttgcaggggtgcggttcatgctgggcagcgtgctggtgctgctgggcagcattctgctgcagggaaaagcaccccgcctgccccggggcagggtggcaaccgagtgctgtgcgctgggtctgtggcagaccacggcacagtatgcgttctactatatcgccgtggccatgctcaccggcgcgtttggcggcatcctgaacagcacccaaagctttctgggcgtcatctttgcccactttatctacggcaatgcggaccgcatgaccccggcaaaaacgctgggctgcgctgtgggttttgccggagtgcttatcggtacgattggcaaccacggcagcggcagcggctggggcgtgttctgtatgatggcggcgaccgtcatcttcactctgtccggcccgtggaacaagtcggtcaccaaaaaggccgacagctttgctgtctgcttcctgaacctgtttgtgggtgggctggcactgtttgtgctgggcactgtcatgggcggccgtctccatgtgcaaagcgcactggctgcggtggtcatgctgtatctggcctttatctgcggcgcaggctatattttgtgggcgctgctgatgaaaaacaacccggtcagccgcatcgccatctttggtttcgtcaacccggtggtcaacgtgctgctcagcgccgtgctcaacggagaaccgctgttccgctggcagtatcttgcggcgctggtgttcgtgtgcgtgggcatctggctggtgaacaaagcccccgccaaaaaggagaaggtatgaccggacctatttttgacacccacgcccattacagtgcccgcgcctttgatgccgaccgcattgcactgctggacagcctgcccgacaagggcgtggtaggcgtgtgcgagcaggccacccactccggggatgcgccccgggtgctggagctggcgcaccgctacccatgggtggtggcggccattggcatccacccggaaagcctgctgcccgccgccgactgcggcgaggaaggccccgcgcccacggtgtcggtgtacggcggcgattgggccgccgagatgcgggcgctgatgccctactacaacgaccccaaagtggtggcggtaggggagtgcgggctggactaccactggcctgtgcccaaggacgcccagctggcactgtttgaagccgagatccggctggcgctggaactggacaagcccatcatcgtgcacgaccggcaggcgcacgcagatgtttacgccctgcttaaaaaataccgccccaagggcatcgtgcactgctattccggcagcgccgaggatgccgtgcagctggcagcgcaggggctgtatatcggctttggcggtgcctgcaccttcaacggtgccaagcgcgcagccaaggccatcgaagccctgccgctggatgccatcgtgctggagaccgactgcccctatatggcaccggagccggtgcgcggcacccgctgcgacagctccctcatccgctatgtgggcgcatacatcgcccagcgcaaggcgcttgccccggaagaggtgttccgcaccaccgccgcaaacgcccgccgggtgttcgggctgtaaccgtttttccgcaggtcgcggggcaaagcgctccgcttctgaataaaaagctgatttattgaaaacgataagaataaggagatcactattatgaaggcacgtattcccaaacaccgcgagttcatcatcaacttccccgacagcatcgaccagaacaaggccaacgagggctgggcaaagctgcagcagatcgtggaggactacaagaaggcacacaacggcgcttctgtttacgctcccaccttcatcgaggactgcgagcccgaggtcaagaagctgcaggaagagtacggctttgagtacaccgtggagttcgttcagtaagttcagcatcgcctgatagtaaaagggtcattgcacaaaccgtgcaatgaccctttttgcgtagcatggcagctggtgtggtttcttggacttgtaaatccttagcagaaccgttaaaatgaggaggggagggtgaacagcaggatgaatgtgcaagcttatttaaacaatgtgagtttccctaagaacatggaagaacttgaccattatgcagatcaatttgacgttgaagttttaatgtgttcagagtgggtggagtggacagtgcctaagtggacggttcccggtgatattgtactgttttttcatgcaaaaacggccattcagagtattcgccgtttggagaccgcattgaaaaaaagaaaaagaacatctatcgcaaggagagtatcggaggctttggaaagcgttgcagcgggcacgcttgctttaccaaaagtacggtggaaaaatattggcaattggcaaagttgcagagcaaccgttttacgatgcacattccggcatgagcgaggaagagaaactgcaactgaatgtgaacttcataacaagccgcaggatctttgcgaaaatagatgaaatatgtttgctgccacgcccggtagatatttctgagttttcagattttattttcgtttcacgccaaagtgctatcacgcctgtggtgggaagtgactttgggcgtctgaaagcattacttgcaatcggaaataaattgccgccatatctgctggagagcagtgcaatcccgctgccgctgcaaaagatcaacgcagaaaattggcttgaagtcacacaagcataccgccgactgtttacgttggaaattcagtttcggcggttttatgtggactattttctgcgtgtgctgggagatcagaaaaagttcttttcagaatgtgcgtgtcatagggatggtaaatataccgggtttgccgataatgcggtcaaactgggtggaaaatggtgttttgtggagataaagctcaatgttcaagccgaacagcatctgcacgaacaactgaaaaaatattgtcatgcagaatgggcagacctgcgggaggaacgcgtcctgcggcaggaacggatatggcagaatacgatgttggtaatggatacaacaagtctgtattgctacgatgtggcaacagatcagctggatctgctggtacagcttgatgccatccgagcagaggaggatattcgtattctgcgggaggagctcatcccgcgcctacggtaagagaaagacataaaaagggtcattgcacaaaccgtgcaatgaccctttttgcgtaagtttattccataaaatggcatcccggagcgtccgcagacgctccgggatatcgaaattataaaatcgctattccgctgaaaaagtccagagcatacgcggagggcagcctgaatcatcctccggacttgctgccttacacctcgtagtccagacagacgcggtttttgtagtagggacgcaccttgctgtttgccactgccacatgtgccgggtgggtggagtagcccttgagcgcctcggcgctctcaaaggtggtgtccagcatcaggtctgcgttggaggaggggagcgcatcaatgttgacgtggatgtccacaagccccggaatcttgccggaaaggctttccagcccctccttgatgccggccttgacggcggccttttcctcggcggacaactcgtccttcagctgccagagaataacgtgcttgaccataacaaaaaacctcctgcgttttttctcattgtaacagggtgagaaaaaatccgcaagagggaagctgtaaagtcttatttgggtgcgaacagcagcaccaccaaaagcacagcacagagcaccgaaactacgatgccctccagccgggtcagtcggatgtactcttccgtaggctcgggcacctgcgtataacgcctgcgggaacgcaaggcaatgacgttctccggttgcagtgccataaaaatgccgaacccaatgccgaaaagcgcggttaagatcgcgcagatgacttccatagaaacatcctcactttttgtcgtccctgctcagggtatagcacagatgtgagatcagcaacgcaacgcagaacacgagcgtcacgaccatcaaaatagagtgcagtggctctaccttgggaagaaaaatattgactaacaggaatgcgccgccgatggtcgatgctatgccgaataatttgctaaagtgcttcttttcgtcctcattgctccaaccggtgccggtgccattgtacaagtcccggatgccgcggtataaaaatagcacgcccagtgcagcgttcagccagtctgaagtggaaaggttcaggttcatatatttgtacttgcctcccggcggctcaatccgcgctgtgctcccagatttcatacaggatcaggtagattacatcaacgatgactgtaatggtgcgtaccccgttgctcagggtagggaaaccgcccagaaactgcgaagaagcaagaaccattgcgttgaagatctcccacacgccgtttttcttctgccacatggcgcggtattccgggtcgctgtcatattgattgaaaaaggtgtggatcggcgggtctttgccctgcaggtcgcggatgcccatccacagcgccacaaggcagaacaagagttcaataatgttgtaccagccaaacgccagctgcataaaatacacctcccatcttttaccatattataacataggggagcgaaaacacaaggacggcattcaaccttcctgcgtaaattttgcataaattgcgcatcaactatttgttgaaacaacataaaacaaaaccagccggacgaggcggttgcaagccctcgtccggctggatacttacttcttcggagtcataagcctcttctccttggtgacctcattttcggaatacgggtttcatagggtgactctccttagaaacgtttcttcagaatttaggtactttgcaaggggatgaaaatcaactgtacattggactgacccttttctcaactgttggactgcggcaaacggttcatgaggatgaatttcatattaccacattctttcgagttagatttgcaagggaaacgtcttacttagtacattggtagaactccttttcagctattcaaataaggttctccggatcattgatactttcataagaatcatctccagcggatctatctgaacgctatggggaagaattgaatcgacaggttgtcgtgttatcgcatttttgatgctcaagactggctctgtttttgtgtttttatacgggggaaacatcccgtttgtggtgagcctctgttttgcttctcagcgaaccccgacagcctgtccctgctgtgcgggttccatatcaaccatcggtcttcgctcctttcttcttaaagtcagcgggagtagctctcttttgagcttctgctgtacttctctggtttctggcttaattatacaggaagatgcacgttttgtctattggcagaccgcacaaagaatggactttgtttttgtgcaatgctaaagtctgcggcagtgcgggaaaattgcccagaagttccgggtcgttcgtgaaggatattccacaaaaggggagaaagtgcctgcaagctattatgcgccggttctatttgtgctaaaatagcgtcaatgaatggtagtcgccgccgccccgcgagatgaaagtttcgcggggcggcttttttgcggcgaaaatttgcataaaaaagaaacggagaatcaatcaaaatgcctaaaactttaccggaacgcatcttctttaccattgtcatggccgctatcatggtctatggcatgatcgtctacaatgtggcgctgaacacaaacggcgtgaccaatgctacgtttgttatggctctgcacgaaatgccgatcatggtgccggtggcctttgtgctggaattttttgtggtggaaaagctggccactaagctggcattcctgtttatgcgccccacagaccgcccgcagttcatcacctacgccatctcgctgatgattgtgtgcatcatgtgcccggtgatgagtctggttgcaacgctgctgttcaaagagccgagctttgggatgtgggtacatacttggggctgcaatatgcccatggcgctgtgctggcagatgctgtactgcggcccgctggcccgtgccatcttccggctggtgttccgccgcggggaaaagcaggccatgtaaggcggtttggctgcgattctataataaatatgtataagaaatatacataagatgctgtccaaacataccggggaagatacctatacgttttttatatacctgatatataaaagctatacggtacggctatttttgcggaaatatttccaaaaaccgggagaatgcacctgcaaagcactggaaaaaaccaagaaaattgtacagattatatgcttctttaacttgcaattgtgcactctgtacaacagttttgttttgtcggtgcaatgctaccgggtaaaatgtagaatgtgcacaaatacccttgccaattttgtgcaatcgtactattatacacaacgaaaaaagacgaaaccgacaaagaaaggggagggcgcggacagcattcaggcagcgccttccttgcttttttcacggtgcacagtcttttcttcgcgcgataagaaggtgtgaaggggcgcggagcaaaggtgtgcggcagatcctcggccggggatctgccgcacacccggctcccgcccgcaagcccctatccctgcaggaaggaggaaaagcaaatgaacaaattgacgcaggctctgatggaagagcttaccgtggagtatgtcaaggtcggctcgctgcagatcccggaatcggtggtcatcagctgggtgatcatgctgctgctggtggtgggctccatcctgcttacccgcaacctgaaggtggatcacatcagcaagcgtcaggcagcactggaagcgctgtactcccttggcaaaaacttctttgaagggttgctgggcaaggagggcagccgctatgtgccctacctgatgaccgtggcgctgtacattgcctgctctaacgtgatcggtgtgttcggcgtaaagccccccacaaaggatctggatgtgaccgctgcgctggcactgatgagcatcgtgcttatcgagtattcgggcgttcgtgcccggggcggcgcgggctttctcaagagccttgcagcccctacccccatcatgacccccatgaacatcctcgagatcgccattcgccccaccagtctgtgtatgcgactgttcggcaacgtgctgggtgcgttcgtcatcatggaactgctcaagctggtggtgccggtgttcgtcccggcggtgttcagcctgtattttgacctgttcgatggtctgatccagacctatgttttcgtgttcctgaccgcactgtttatgaaagagagcatcggcggcgaggaataaacaacacatttaaaactgtaattacaaaggagatagaactatgagtggtttggtagctctgggcgctggcattgcagcgctgaccggcattggcggcggtattggcattggtattgcaacgggtaaggcaacggaggccatctcccgccagccggaggcttccggtaagatccagacgaacctgctgctgggcgctgctctggcagaaggtaccgcaattttcggcttcgtcgttgcactgctgatcatcctgttcctgggccagtaacggaggcgtggacgaatgctgaagttggatttgaacctgctgtggaccgtggtggatgtcctgatcctgtatgtgctgctgcgcaagtttttgttcaagcccatccagaacgtgctggatcagcgccagaagacgatcgaggcagacattgcagcggcacagacctccaagaccgaggccgccgcagcacttacgaccgcgcaggacaagctgcgtaatgtggacaacgaagccgcagcccgccgcgaagcctacgagaagcaggccgaggtggagaagcagcagctgctggccgacgcgcagaagcaggctgatgagatcgtggctgccggtaaggctgctgtggagatcgagcgccagaacaagctgcgggaagcagatgcacaggctacggcactggcacgctccatgtgcgaaaagcttttgaaacataatttgaccgcccaggatgatgatcagctgctggacgatctgctgcagaaagcaggtgcaggcaatggcaactgaattcagtcgtgaattttttgcggataaccgcatcgtcaaggccagcctgcgctgcgcccataaactccgcgaaaaagatctggaccgcatcaagtcggagatcaaaaagctgtatgacgccacggaagtcatcctgaatatcaccgtggacgagagcctgctttccggctatgtcctgcaggtgggcgaccgcgtgttcgacaattccggccgtcatcagctggataaaatgatggagggcaagccctcgctggctaccctcaagacccgcatcgaggactacaagcccgccgagacctctgcggagggcggcgtggtcatctcctccgccgatggcatcgtgcacattgacggcatgaaccgtgctgtgtacggcgagatcgtcacctttgaaaacggtgccaagggcatggtggaaagcgtagagcccgagcagctgggtgttatgctgttcgatggtgccgagaccgttggtgtgggcaccatggtcacccgcagcggcaagcgcgccggtatcccggtgggcgatgcttttctggggcgtgtcatcagcccgctgggcgagcccatcgacggcaaaggccccattgaggccgaaggctacaaccccattgagaagcaggcacccagtattctggagcgccagagcgtggacaccccgctgcacaccggtattctggccatcgactccatgttccccatcggccgcggtcagcgtgagctgatcatcggcgaccgccagaccggcaagacttctattgccaccgacgccatcctgaaccagaaggacaaggatgtgctgtgcatctatgtcgccatcggtcagaaggcttcctccatcgcccgcgtggctgaggatctgaaaaagcatggcgctatgagctataccaccatcgtggcagctaccgcgtcggattctgccccgctgcagtacattgccccctatgcgggcactgcactggccgagtacttcatggccaagggcaagagcgtgctcatcgtttacgatgatctgtccaagcacgcggtggcctaccgtgccatctcgctgctgctgcgccgctccccgggccgtgaagcctaccccggcgatgtgttctatctgcactcccgtctgctggagcgctcctgccgtatgcgggatgatctgggcggcggctctatcaccgcactgcccatcgtagagacgcaggccggcgatgtttcggcctacatccccaccaacgtcatctccatcaccgacggtcagatcttcctggagagcgccctgttcaacgccggcaaccgtccggctgtcaacgtgggtctgtcggtgtcccgtgtgggcggcgctgcccagaccaaggccatgaaaaaggccaatgcaaacctgcgtatcgagctggcacagtataaggagatggaatcctttgcacagttcagctccgatctggacgccgagacccgccgtcagctggagcacggcaaggcactgatggaaatgctcaagcagccgctgtgccagcccaagtccgatgccgagcaggtggtcattctggtgctggcttcccacggcctgctggacactctgcccaccgcagaacagcgggaaaagaccgctgcctttgtgcggcagttccgcgcagacgtctccggcaccatgcagaagatcgatgctgacggcaagctggagcccgaccgggtggatgccatcctgaacgcttggaaagcttatgcgggaggcaatgaccatgtcgtccagtaagctgctgaaggagcgcatcgagagcattcaggacaccatgaagatcaccaatgccatgtacctgatctcttcgtccaagctgcgcaaggcacggcagaactaccagaatgtgtccccttacttcaaccgtatgcgggataccatctcccgtgttgtgccgcatctgccggaggagccggagcaccccttcttccatgagcggaatctggaaaacccccggcgggcgtatttggtgcttactgccgataagggcatggcaggtgcttataaccagaacctgctcaagtttctgcgggagcacgcagaccccaacgaccgcttttatgtcatcggtcaggtgggctaccgcgccctgcgccaccgggacccccgccttgtggaggagttccgttatagtgcaaccgcacccactttgcagcgtgcccgcgacatcacggtagacgccattgacgacttcaagtccggcaagctggacgagatctacatcgtctacaccaagatccagaacgctcttaccagtgagcctgtcatggagcgtctgctgccgctggaccggcggtttttgcagcctgctcccaagggtctgggcgaccccaagggcgaggtggaactggtgccggacgcatggacagtgttcgagcagatcgcacccatctatatgcacggcatgatctttggtgccatgaccgagagcttctgcgccgagcagagcgcccgcatgaccgccatggattctgctaccaagagcgccaatgatatgatccgggacctgcagctggaatacaaccgcacccgtcagggctccattacacaggagatcaccgagatcatcggcggcgcagctgccgtgcaggaccggacataataaaggaaaaccctctccgtcacgcctgacggcgtgccacctcccccgaagggggatgtttcagggcagttgacggcgatgactgagagggttcgttggacaaacaagatttgacaagaggcaatccaaatgatacagggaactattattcgcgtagcaggccccgtggtggatgtgcagttcaccgccggcaggctgcctgccctgcaggaggcgcttaccgtgaccgcagagggcaccgagcgcaccatggaggtgacgcagcacgtcaacgagaccacggtgcgctgcatcatgctttctgccagcgagggtctgggcaagggtatgacggtggaagctaccggccacggcctgaccgcccctgtgggcgagggcacactgggccgtatgttcgacccgctgggccgccccattgacggcaagggtgctgtggacgagctgccgcactggcccatccaccgcaaggcacccggctttgcagagcagaagcccgcaactgagattctggagaccggcatcaaggtcatcgacctgctggctccttacgccaagggcggcaagatcggcctgttcggcggtgccggcgtgggcaagactgtgctgatccaggagctgatccataacgtggccaccgagcacggcggctactccatctttaccggcgtgggcgagcgctcccgcgagggctgcgacctgtggggcgagatgaacgcctccggcgtgctggacaagaccgcactggtctttggccagatgaacgagcccccgggagcccgtatgcgcgtggccgagaccggcctgaccatggcagagtacttccgtgaggagacccacaaggacgtgctgctgttcattgataacatcttccgtttcgtgcaggccggcagtgaggtctccgctctgatgggtcgtatgccctctgccgtgggctaccagcccacgctggccaacgagctgggcgctctgcaggagcgcatcacctccaccaaggacggttccatcacctcggtgcaggccgtctatgtgcccgccgacgacctgaccgaccccgcccctgccaccacttttgcccatctggacgccaccaccgtgctgtcccgtaagatcgtggagcagggcatctatccggctgtggacccgctggcctccacctcccgcattctggaggcggacatcgtgggcgaggagcattaccgcgtggcccgcaaggtgcagtccattctgcagcgctatcaggaattgcaggacatcattgccattctgggcatggacgagctggacgagaacgacaagctgaccgtcatgcgcgcccgcaagctgcagaaattcctgtcccagccctttgccgtggccgagaactttaccggcctcaagggcaagtatgtgcccctgaaggacaccgtgcgcagctttgccgccattgtggacggcaaggccgatgacctgccggagtgggcattcttcaacgtaggtacgctggaggaagcacgcgaaaaggcagaaaagaagctggctgaggaaaagggcggtgccgtctgatgaacaagttcatgctgagcatcacagcgtccagcggcgagttctatcagggtgactgcgaggatctgaccctgcccatcagcgatggcatctacggcgtacaggccgggcataacccggttctggtagcgctgcatatgggcatcctccactttgtagtggacggcaaggcccgggatgtgctggtgggcgacggcattgctgaggtgacccccgcctatgtgatggtgctggtggacagcgccgagaacccggaggacatcgacaagaaccgtgccgaggctgcccgcatccgcgccgaggaacgcttgcagcataagcagagcatgcacgaatattaccagagcaagatcgcgctggatcgtgccatgcagcgtttgcaggccgccgcaaagtataagcgctgaggcagcattcctattcccatataacaaaacctccccgtgcaggataactgcatggggaggtttttttctgtctgtcagcgatgcgaaaattgtgtcacagggtcattttttggaatcgtcctgcgtgttgccgcgccttatgcccgcacatcctcccggcgtaaaagcagccatgccagaaggaacatcgtccccagccagaagatgcagctgaaagcaaacagcccgtagctgcccgccagagcatccgcacttttgttggagttcattccgagttgcatcagggaatagggccacaacagcccatgacccttggagctgataaagatgccggtaatgccgcccagcagccccagaaaaatgggtacggcaaagctgcggatgaccatggccagcaccagctgtgcggcaatgacagccaacgcacccagcagtccccgcagtaaaaacagaggtaaggtgaccggcggcagcccgggcaggtgggcaaataccttgccgcagaacacgaacagcgcgaacacaaagccgtgggtcagcagcgccagctttgtcaccaccgcaaactttgcggcaaacagggccagcggcggtacggggcttgccatgataaggttccagttgtgccccagatgttccagccgccacaagtaggcagcataggtggctaccatggcagggaagaagagcatggaataaaacagggtgtgctgggtccacaggctataccagccgtcggtgaggatctcaagattttgcagataattgaaggtgccgtaggtggccgaaagaatgggcagaacaaagaacattgcccagatgggggatgcgtggagtttgcggttctccgcaagaatgcagcgtttcagcatggttttatacctcctcgtcctgtaccttgcgccacgcaagggcaaacagcacagcgcccagcgcaagggtaaaggccagcagtccccagttgaaggggcgggtgccgtaggtgacggtgtgggtggccttgtcccagttcgccacttcgtaggcgctcagagggatgtagtacccaaagggcacaaaataactggcaagcggcggcataaaagcagagaacagccccaccagcgcccctacaatgcccacgcagagcgccggcaggggattgcccacccacagcatcagcagaaattctccaaagaagagcattgtgtccacagccagcgtgcagacgaacagatagcatagctgcccagtgggaaaggcttcggtataaccatggacacgccccagcaccggaacacaggccagctccagcaccgtgaccaacagcacctccagcactccaaagaccgccttgcctgcaaacaggcttcggcggttttgcagggtgtagagcagcttggcggtgttgcctttgatctccatatcccacagccgggaggccagcactgccatcatcaccggcatcagaatggcttcaatgacgggcaggctgtaaagcagggcgctgtaaccgttggcaagctcctccgggtctgccggggcaaggccgcccacccatagaacgacaatgccggggatgagcaggcagagagcaaggtcgtgccgacggtgggctttttgcagttctgcacggaaagctgccatcttacgccacctccccgctggtctgggtcaggctgaggaagatgtcctcaaggctctttgtctgcgcagtcagacccaccacacccacgccgctttcggcaagggtacagaccagcgccgccagcgcttcgtccggcagcgggggaagctgcagggtgtccggctgatctgccggtgcagcggcttttactccctgctgctgcaggacggctgcggctttgggtgcgtccagcacccgcagcagaatgccgccccggctgtgcttttgcagttgctgcagagaaccctcgaacagcagtttgccgtggttcaggatgcccacctgatccaccatctgctcgatctcgcccagcaggtggctggagatcagcacggtggctccggtggtctggggcatggaagcgatcagactgcgcatctcctgaatacccgccgggtccagaccattcgtaggttcgtccaagatcagcagtttggggctgcccagcagcgccatggcaatgcccagccgctgcttcatgccaagggaatactgccccaccttccggttagcgtctttggtcaggtgcacgatctccagcacccggctgatgtccttccggtccacgtccttcaggtcggccacgatggaaaggttttcgcgggcagtcaggtgcaggtaaccggagggggattcgatcagactgccggtctgccgcagcagggcgatgcggtttgcttcgttcagggtgtgccccagcagctccacgctgccgccggtggggtgtacaagccccagcagcatcttcatggtggtggatttgcccgcaccgttggggcctaaaaatccgtaaacacagccctccgggacagtcaggttcaaatgatccaccaccggacggccatggtagcttttgcaaagggcatgggtctcgatcacaggtttcataaatggtctcctttcgcattcatgtttttcggaacgatgccagaatacacccgctgccttaaactgaccggaagcgcagcttaatttacccttaaatttgcaggtgttttccgctgcggcgcaaaaagtgtggtatagtaaaggcgggaaaggagaactgcccttatggataccatttatgatgcaaagcttctcattgtggatgacaacgccgaactgctggcactgctgtgtgagcagctgcggggcgcaggatatggccatatcagaactgcccaaagctgcgccgctgcccgcgcctgctttgcggcggaacagccggagctgatgattctggatatcaacctgccggatggggatggattttcgctgttccgggcgctgcgggcaaaagcggatgtcccggcgctgttcctctccgcacgggacgcggatgccgaccgtctgtttgggctgggtcttggcgcagatgactacctgaccaagccttttctgatgcaggaactgctgctgcggaaattggcagagaaccggggacacatcgttacctacgatgccctttgtgcggcggtctggggcgcagattactatggctacgagaacagtctgggggtacatatccggcatctgcgggagaagctggaagccgaacccggtgcgccgcagtttctgcggacggtgcggggcattggctataagctgacaaagggggaagaagcatgaaaacctttgtgcgcctgatccggcggtatgtgctggcggcggtgggcatcgttctgctgctgttgttttccggtgttgcagtgctgggctggctgggctggcaggagggctgccgcctgccgcagcgggagtattcctccagcgagatcgcggattccatggtggagaccgccgaagggcttgcctttggggcagaacgcaccccgcaggagtggatgaacggctacgagtgggcgatggtactggacgatgtgggaaacatccgctggagctacggcctgccgcaggagctgaaccatgcctacactcccggcgatatcgccaaatttgcccgctggtatctggcggattacccggtgttctgctggacagaaccctacggactattcgtcatcgggctgccaaaggggagcctgtggaagtacagcatttacagctcaccggactttgccctgagcatggtgcaggtgctcccggcagcagcgctgggaatgctgctgctgggtctggttctctgcttctggctgagctggcggggggcaaagcggctggagaccgtggcaaacggtctggaagcactggcgcaggggcagaccgtccggctgcctaccgacggttttgccggggaactggcagaaaagctgaaccagaccggggcgcagctgcaagccaaaaatgagatgctggcccggcgggacaacgcccgcacccagtggatcgcaggagtcagccatgacgtgcgcaccccgctggcgctgatcttaggctgggcggagcagctggaacaggatgcacttttgccggacagctcccggcagaaagcaaccggcatccgcacccagtgcgaaaagctgcgcacccttattgatgacctgaacctgaccagtaagctggaatacggtgcccaacccctgcgccggaaagacctccgggcagggccgctgttccggcagctggtggcgcagttctgcgaaagcccactggcagagcgctgcgagatcacgctggaacaggaagaaccagcagagcagacagtgctttcggtggatgaggcgctgctggcacggctgctggaaaatctgctgaacaacagcgtccggcataacctaaagccggtgaacattacggtgcacacccggcaggtaggggagcgcttctgcctgaccgtggcagatgacggtatcggctatccccctgccgttctggcggcactgaacgctgcggagcctgccgaaaatgcgcctcatatccttggcctgtatgtagtgcagcagatcgccgccgcccatggcggcatggcagtgtttgggcagaacagcccctgcggggcaaaaacaacggtctggctgcccggccgggcgtgagcggggcaaaaaaagaaaatagcgcaaaaaacaggccgctgcttgcagttgtagcaaacagcggtcttattgttatgcgtttttgcttttatccagcgcatcaaactgctgcaggatctgggggtctttcagtttgatgaccttgccggagaggtagtgcagggtattttcctccggcacatccagaaagctgatgcgcaccgcgcacagcgcctgcgtttttgtgccggtacgctcgttcatcttgcggttgccgtatttgatatcgcccagcaccggcttgcccagataggccagatgggcacggatctggtgggtgcgcccggtgacaaggccgatcttgcacagggcaaaggggcctgcggtgcgcagcacgtccacgtccgtaatgatctgcttgcgacgctcgtcctgcgattgatgggcgtggatgctgaccttgttgtttttctcgtcgtgctcccaccatgcggtgaaccgcccggactgcggaatgcccaccgtgatggtgtagtactcctttttcagcaggtcggtgcggatgatctcgttcatgtcccgcagggcggcgtaattcttggcggcgatcaccagcccttcggtgccgcggtccagccggttgcagatgccgggcttgaagcggttttcaccgtgggggtcgtattcgcccttctgggtcagatactgggtaaaggcatccaccagattggcatcgccggtgcggtcgctgtggcacagcagatgggtaggcttgtacagcaccgcaagattttcgtcctcgtagatgacggtcaccttgggctgattgggctgctttttgggggcagccttctgcaccggctttgcgccctcgggcgggaagaactcgtcgttgatgtacaactcgatcaggtctcccgcctgcaaacggtactccggtgcggcctttttgccgttcaccttcacccgcttgttgcggaaacttttgtacagcaggctggtgggaaaatcgcgggtcacgctctgcacaaagcgcgaaagacgcacgccgtcatcgttggcggtggcagtaaattgtttcataaagctatcctcatcgtttttgtcagaatcatgcttttatagtaatacaggcgggacgggaagtcaacgcgcattccggtgcaaaatccgggttatttttgcagaacgcttgtgtttgcgccgcaaaatgggtactataaggaaagaacatagaaaaaggagtaccgccatggcagagaataaacggcacaagggacatcgccagcggatgcgggagcgggtgcagagctacgggctggacagtctggccgagcacgaggcgctggaatatgtgctttacctgaccaacgcccaaaaggacaccaacggtatcgcccacgacctgatcgaccggttcggggattttgcggcggtgctggaagccagcgaggaagagctgtgcacagtagagggcgtaggcccctctactgcccggatgctgcatctgctgccccagatcagccggtactatggccgcagccgcaccagcaccactcgctgcatcaagaccaccgagcagatgggcagctacctgatggcaaaatttgcgtggtcggactacgagcgcgccatgctggtcagtctggacagccgcaagcgggtgcgcgccgccgtctggctgcgggagggcacctccgaccgggtcagtctggatatcaaaaatgtggtagcagccgccatcaagggcggcacggacgccgtggtgctctgccacaaccaccccaacggggtggcactgccctcgctggaggacatggacgctaccggcagcattgcccgggcgctggggctggtaaatgtgcacctgctggaccactttatcctgaccgacaccgagtatttttccatgcgggacgccaaccgcctgcctatctacgatttcaagaccggcacgctgttctggccgtaaaacaaaaaactgtttacattataaaatgtgcgtgctataatacaacttgaagcaacaacggattgtggttatacgcacggaagggagaaaacgatggcagaggaaaaatttgaactggtgtcgaactatgcccccactggcgaccagcctcaggcgatcgcgcagctggtggagggggtgcagcggggtgaccgctgccagaccctgctgggcgtgaccggcagcggcaaaacctttaccatggccaacgtcattgcccagtgcaaccgccccacgctggtgctggcgcacaacaaaacgctggcggcacagctgtgtaccgagttccgctcgtttttccccaacaatgcggtggagtacttcgtcagctactacgactactaccagccggaggcctacattcccagcaccgatacctatattgaaaaggacagcgctatcaacgacgagatcgaccgcctgcgccactcggctacggcggcgctttccgagcggcgggacgtcattattgtggcatcggtatcctgtatctactcgctgggcgaccccatcgactaccgcagcatggtcatcagtctgcgccccgggatgcagatggagcgggacgagctgtgcaaaaagctggtcaccctgcaatacgagcgaaacgacgtgaattttgtgcgcaataagttccgggtacatggcgacacggtggacatttatctggcttatatgagcgagcttgccatccgggtggagttcttcggggacgagatcgaccgcattaccgagttcaatcccctgaccggctccaagcagaacgtggtcaagcacgttgccatcttcccggccagccactatatcgtcagcgcggaaaaaaaggccgctgcgctggaaaagatccgcgccgagtgcgatgcgcaggtcaaacagttcaccgccgagggcaagctgatcgaagcccagcgcattgcccagcgcactaactacgatatcgagatgctgaacgaggtgggtatctgcaagggcatcgaaaactattcggcggtgctgtccggccgcgcgccgggcagtatgcccaccactctgctggattatttcccggaggattttctactctttgtggacgaaagccacgtcaccctgccgcaggtgcgcgccatgtacggcggcgactacgcccgcaaaaaaacgctggtggaatacggtttccgcctgccgtctgcctttgataaccgccccctgaaatttgaggaggtggagtccaaactcaaccagatgatctttgtctccgccacccccggcgagtacgagcgccggaacagttcgcaggtggcgcagcaggtcatccgtcccacgggtcttttggacccggtcatctcggtgcgcccggtggaagggcaggtggtggacctgctgggcgagatcaatgctcgtatccagcggcaggagcgggtgcttgtgaccaccctgaccaaaaagatggccgaggatctcaccgattacctcaccgagcaggggatcaaggtcaagtatatgcaccacgaggtggatacctttgagcggatggagatcatcaaggatctgcgtttgggcagcatcgacgtggtggtgggcatcaacctgctgcgcgaaggtctggatctgccggaggtgagccttgtggccattctggatgccgacaaggagggctttctgcgcagcgagaccagcctgatccagaccatcggccgcgccgcccgcaacgcggagggcatggtcatcatgtacgccgatgtggtgaccgacagcatggagcgcgccatcaccgagaccgagcgccgccgcgccattcagatggcctataatgaggaacacggcatcgtgcccaagaccatcgtcaaggccattgcggacagcatcgagatcagcgataaggccgaaaacgccaagcgcaacacccgccgcatgggcaagatggagcgggaagctgccatcgagcgcctgacccgggagatgaaggaggctgcgaagctgctggaatttgagcacgcagccttcctgcgggatcagatcgaccgtctgcgccggggcgagaaccccaccgtggactccgctgccgagaccgaacgcaaacagaaccatgcacagacacaacgaaaagggagaaaataccttggcaaacgataaaatcatcatcaagggtgcccgcgagcacaacctgaaaaatatcaacctgaccctcccgcgggaaaagctgatcgtcatgaccggcctttccggctcgggcaagtccagtctggctttcgataccatctacgccgacggccagcgccgctatgtggaaagcctttccagctacgcccggatgtttctgggtcggatggataagccggacgtggacgagatcaccggtctttcgccggccatctccatcgaccaaaagaccacaagccacaatccccgctccaccgtgggcactgtgactgagatctacgattatctgcgcctgctgtacgcccgcatcggcgtgccgcactgcccggtttgcgggcgggtcatcagccagcagagcgtggacgagatggtggatgccgttctcaaactggaggagggcacaaagttccagatcttagccccggtggtgcgtcagcgcaagggcacccagcagaaggaactggacgccgcccgccgcgccggctatgcccgcgtaaaaatcgacggaaacctgtatgatctggacgaggagatcagtctggaaaagaacatcaagcatacggtggagatcgtggtggaccgtcttgccctgcgcaagggcatccgcagccgtctggcggattcgttggagaccgcgctggcgctcaccgggggcgtggcggaggtggacgtcatcggcggcgagtgtatgaccttcagccagaactttgcctgcccggagcacggcatttccatcagtgacctgtcgccccggctgttctccttcaataacccgctgggcgcctgcgaaaaatgcaccggccttggcacctttatgcgggtggacgaggatcgcatcctgcctaaccgcagcctttccatccgggagggtgccatcaaggccagcggctggtattacgccgagggctctgtgagcgagatgtattatcttggccttggtaaaaaatacggctttacgctggatacgcccatcaaggagatgagcaccgaggcggtgaacgccctgctctacggcaccaacggcgaaaagatcgagatgcaccgcaccaacgagttcggcagcggggtgtactacaacacctttgagggcatcgtggaaaatctggagcgccgcttccgcgagaccaacagcgagtggatgaaggaagagattggcagctttatgtccggcgtggagtgcccggactgccacggccagcgcctgaagccggtggtgcttgccgtgactatcggggataagaacatcagccagttctgtgagatgtccatccgggacgagctggaatttatcaagcaaaacgagccgaacctcaccgaaaagcagcagcagatcggcggccagatcatgaaggagatcaagaaccgcctgcaattcttgcagagtgtgggtctggattatctcacgcttgcccgggcggcgggcacgctttccggtggtgagagccagcgcatccgtctgaccacccagatcggtagcgccctgtccggcgtgctctatgtgctggacgagccctctatcggcctgcatcagcgggacaacgataagctcatcgctaccttgaaaaacctgcgggatttgggcaacacggtcatcgtggtagagcacgacgaggacaccatgcgcagcgcggactatatcgtggacgtaggccccggtgccggcgtgcacggcggcgagatcgtagccgcaggcagcgtaaaggatatctgcaaggccaagcgcagcattaccggcgactatctctccggccgcaagcgcattgcagtgccccagacccgccgcaccggcaacggccactgtctgaccgtaaagggcgcacgggaaaataacctgcgcaacatcgacgtcagcttccctctgggggagttcatctgcgtcaccggcatttccggctcgggcaagtccagcctcatcaacgagatcttgtacaaaacgctggccagcgaactgaacggtgcccgctcccgcgccggcaaatgcgatggggtagaggggctggagttcgtggataaggtcattggcatcgatcagcagcccatcggccgcaccccgcgctccaaccccgccacctacaccggcgtgttcaacgatatccgcaccgtattctcccagacgcaggacgccaagatgcgcggctacggcccgggacggttcagcttcaacgtcaagggcggccgctgcgaagcctgcgagggtaacggcatcttgcagattgaaatgcactttctgccggacgtatatgtgccctgcgaggtgtgcaagggcgcgcgctacaaccgcgaaacgctggaagtaaagtataaggaaaagaccattgcggatgtgctgaacatgaccgtggaggaagcggtggtgttctttgccaaccagcccaagatcgcccgcaagctgcaaacgctgctggacgttggccttggctacgtcaccttggggcagagcgccaccaccctgtccggcggtgaggcacagcgcgtgaagctggccaacgagcttgcccgccgcggcaccggcaaaacggtgtatattctggacgaacccaccacaggcctgcacattgcagacgtgcaccgcctgatcgaggtgctgcaaaagctggtggacgtgggcaatacggtcatcgtcatcgagcataatctggatctcatcaagtgtgccgaccatatcatcgaccttggccccgagggcggcagtgccggcggcgagatcgtagccgagggtaccccggagcaggtggccgccgtgcccggcagctttaccggccagtacctgcgcccgctgctggaacgcgaccgcgcacagcgcgccgcagaagcggaaaaacactgacaaaaacagcaaaaacgaaaaagcgcgtatccgtgtgaaaatcagacttttctcagaaaaaaccaaaaataatcgaaaaatctgttgacaaaacggccttgcctgagtataatatctcttgtcgccacgcttcggtagggaagcggcggtcgatatccgggtgtagcgcagttttggtagcgcgcttgaatggggttcaagaggccgtgagttcgattctcgccactcggaccataaatccaacgatttcacgttagaaatcgttggatttttttgtttataggctggcctcatttggttttgaccacaattttgaccacaatgccaaagattttatctggtctaattagtgccgttccgtccaattttcaggccgaaaatgcctcactgaacaactggatcgcactctgccgaatagattcctgaacatggagataatgctcagtcatttcggtatcggcatggcctacgatgctctggatggtctgaatatccacgcccaacgcctgcatctgtgacacataggtgtggcggcagctgtgcggcgtgagcaagcggacatcgcccgcttcttccagagatttgcggaacacatcccggaaatgggtgggattgcagggcaagccggtcttggggctttcccagatgaactgatcggtggtatcccgcagcttgatggcacacgggcggacattcagcggcaccggaatatcccggatactgtctttggatttcggactgccgatgctgactgtaccttttacgacctttactgcctgccggatgtgaatgacagagccatcttcttcaataaactgcggctccaaagccagaagttcctgcattctcattccagtgccgagtaaaagccgaatgctcaagcccatgcggtcatcgggcagcaccttcatcaggtgtgcgacttccgctgtggtaaaggcttccttgcgttttgcggtgccggatgtccgcatcttttcagcaagccggaccgggttgcggcgcacaaggtcattggcttctgccttttgaaaaatctggtagagcatccctcgtgccttgctgatgtaagaatccgagcggccatcgcgccgcatccctttcaggaaattttcaatgtcgatcgggcgtatgacggtcaaggggcgatgataaaatccctctttgagcattttcaggcagtatttgtagctttcctgtgtcgtgggagcgatattatccctgtgaccctcgaaccatgtatccgcccaatcctcgaagtacaggatcgtgtccagctggacaccgctgataagcgcatcctgatactctttcagtttgagcttgacctccttctgagtcttgccatagaaggtcttgaagcgcggcgaaccatctttctggtagccgtccatcatacgtaattcccagcgaccatcgctgcggtggcgaagcgtaccctcgccgtgtgaacgtttgcttggcatattgcctccttcctgatgtcaagtcgtttcgggaatagtatagaaaaagaaacctcttgaatcaaggatgtcaaatcagccatttacgctgtccgtgatccactgaagaaaacggtctttgggtacgaccatccgcttaccgatgtggagcgtgggaaagccgtccgaacggagcaggatgtaagcgttggcgcgggagatgcccagcgcagcagcgacatgatcggctgtcagggtgatgggaagctgctcatacgaagtgaactgagagcgcatagaatacctcttttctctatatgttgtgttgaatgaatacaggaacactatatattgcactttgatatgtaacaaggggcatctgcggtttgcggatgccccttgtgtatatgggagactaactattaaaagtcaagccccaaaatgaaaaaatccgtctgccgaccgctgcccctgacaaacagcattcaaccgaacacagaagttaagcttacttgtgccgaagatagttagctggaaacggcttgtgaaaataggtagtcgccgacttagagaaacgcttcaggaatttcctgaagcgttttttagtgtgtaaaagataaaattcctacaaatagagcaagatataactgaaaattcatattttattaaaatatttcatggaaattagttgcggctaagtgatgcttatgttacaataatgatgtattagtgtgatgaaaacgggatttgatggagatgtattacagaacggaaggaagtagttgcggtgaaggtggcgatgatcgggcacaaggattttccgagtcgctcgggcggtgtggaggtcatggttggcgggctggccagaagtctggtggaacgaggctatgacgttaccgtgtataaccgcggcttggaaaagcaccataatgtgtacgatgtggacggcgttcatgcacggcgggtgtttaccctgcaaaagcctgcactgaatgccacgatctactcttttctggcgacctttgacgcgctgttccggggctatgatgtgatccattaccacgccatcggacccagcgtaccgctgctgatcgctaagatattcggcaagcacaccgtatgtacggtgcacggactgaattggaaagtagacaaatggcgcggcttcgctagccgttatatgaagctgggagagcggatcgccgcaaaatatgcggatgatctggtggtgctttcggagacggagtggaactattttttgcagaaatatggccgcgcgtctattctgatccccaatgccatccgcttttacgaaaagcacgcgtgcagcctgatccgggaaaaatacgggctggcgaggggagagtacatcctgtatgtggggcgcatctcgccggaaaagggcacgctggatctggtggagggctaccgcaaggccaagacagggaaaaagcttgtactggtcggcccgctggatgatagcgaatattgcagagcagtacagcagcaggcgcagaatgaccctaatatcatcatgaccgactatgtggtgggcgacccgctgaaggaactttacagcaactgcgggctgttcgttctgcccagccacaccgaggggctttccttgtctttgctggaggcactgtccatcggggcacggtgtctggtgagcgatatccccgagaatacggtcgtgaccgacatttacggcgcggccttcaaaccggaggatacggacgatcttgcccgggcgctggaacgggaatgcacacaggagtacccggacgcaatgcggcagcagcagatacagtacatccatacaaattttgagtacgacgtgatgctggaccgttacgaggaggtctatcatcatgtggtgggcgacccgctgaaggcgatgccctccacgctgaaaaagggaagagtgccggcaggcgcaaaagcataagcaaagaacgccccggaaacgtttgacagcgtttccggggcgtttttcgtttagatcagcggggcgatgaacttgagcactatgcccaccagatgcagcagctttttgccctgccagacgctctgacgggtgggctccactgtgcggcactgtgccagcgtatcctgaaaatctgcttcaatgcgaggcaggcagtccacgccgcgcatccagaccgcgttttcaaagtggtggtacaggctgcggtaatccagattgatggtgcccacgaccgcctcctgcccgtccatgatcatcaccttggcgtgggtgaagccgggggtccactcgctgatcttcacaccggaggacagcagcggcaggtaatgcgttttagccagcgcataagcaaaccacttgtccggctttccgggtaggatcaggtgcacatccacgccgcgctcggcggcaaagcgcagggcggtctccagctcaccgtccagaatgaggtagggcgtgatgatatgtacgctgtgccgggcgcggttgagcagatcaatatacaccatctcgcccacacgctcgccgtccagcggacagtccccgtagggggtgacaaagccctttgtctgcgtttccgggagggggcgggtgaggaactgggcaaactccggctcccgctggatgctccacatctgcaaaaatagggcggtcatggtgcgcacgccctcgccctccagcatgacggcggcatccttccagcggccgtatttttcaatgtggttgatgtactcgtcggccagattcacgccgccggtaaagcccacgcggccatctacgactaaaattttgcggtggtcgcggtaattgtagtgggtggaaacaaagggcgtgaccggcgcaaacaccttgcagcggatacccagcgcttccagccgtctggggtagtcccggggcagggtggagaactcgcaggtgccgtcatacattacccgcacatccacgccctgcgcggccttgcgtgccagtatctccagaatacgcccccacatcagcccttcgtcaatgatgaagtattccagaaaaatgtactgggtggcgctttccagctggggcagcagcgcagcgaacttggcttctccgctggggaaataggtcacctgcgtgttttcgtacaccgggaagccgccgccccgtccgcgcagatactgcgccagagaggccgcgccggggcagtccgcgtccagcgccgtgctcgcctttttgtcctgcgccagctggccgcgggtctgtccctccagctccagcaggcgctttttgagcatccggtgaccgacatcctccttggtgtagcagaacagcagcacgcccagcaccggggcaagcgccgtgaccaccagccacgggatgcgcacgctgttgttcatgtcctgattgagcaggtagaccatcatggccgccgtgaccagcaaggtgccgcccaagtagtggggcagcaggttactgaaccagcgcatcaggctgaagagcgccccgaattgcaacaccagcagtaccagcaccagcccaaagcggctgaagatggcatggatgagccctttctggcctttacggagcagacggatgccgccgtcctcaaatacccggaccttgcttctcatggtgtgctgcaatgtttcttttgacattttgaccgtccttttttggaatgtgtcggaggatagcctgcaagccctgtccaaatgacacattttgtgctatgataaaggggaagaactgctgccgggcggcaacagccccggggcagcagaatatatacaaatctattataatccattccggccggtttttccacagaaaccggcagattttgtacagaaggagtttgcatcatgaacaacctgatcattggcatcgcgggcggctctggcagcggcaagaccaccctttcgctgcggctgaaggagcgctttggggaggacgaggtgcgcttgatctctcacgacagctactacaagcgtcacgacgagctgccctttgaagagcgctgcaagctgaattacgaccacccggacgccttcgacaacgcattgctcatctaccatttgcaggagctgaaggcaggccgcgccatcgactgcccggtgtacgattactccaaccacaaccgcagcaacgaggtgcagcacatcgagcccgccccggtgctgatcgtggagggcattctgccctttgtagagccggaactgtgcgccctgttcgactacaagatcttcgtggacacggacgcggacgagcgcatcctgcggcgcattctgcgggacgtaaaggagcgcggacgcagcttggacagcgtgatcgaccagtaccttaccacggtcaagccgatgcacgaggcctttgtagagcccagcaagcgcaacgcggacatcattgtgcccaacggcggcgagaacagcaccgccgtggagatgctggcgcaccacatccgcaccctgatcgagcgggcgaaccgggggtaagataaatttaaaaaggcacccacagccatccggctgcgggtgcctttttgcatacaggtttaacggacagaggtgcgcaccagcgcgcgtttcaggcgcgcctgtgccagctcgtactcacggtcgttcaggttcttgcgagcaaggatctcctcggcgcgcttcttggaagcctccgcacgcgcctgatcgatgtcctcggcccattcccaagtggtagccaccagacgcacgtccccgtccagcacgctgagcaggccgcccatgcaggctgcacggcggcgctgaccgtcggcatccacaatgtgcgcctcgcccatgcccagtgccgtgcagtaatcgccgtgctttgccagaatggcgatatcgccgtcgatggcgcggcagacgatgcgctcggcctgaccttcaaaggcgcagccgtccggcgtgaccaccgtcagatgaaaggtcgtcatggcttaccccttcttcgcttttgcgaacacgtcatcgatggtgcccgcgaacaggaatgcgctctcgggcagctcgtcgcactcgccgctcaggatcatcttaaagccccgcagggtctccttcagcggcacatactggccgggcataccggtgaactgctctgccacatggaagctctggctcaggaagcgctgcaccttgcgggcgcggctgacggtacgcttgtcctcctcactcagctcgtccatgcccatgatggcaatgatgtcctgcagttccttgtagcgctgcagtaccttctggacggcgcgggcgatctcgtagtgctcctgccctacgacctccgggctgaggatgcggctggtggagtccagcgggtccacagcggggtagatgccctgcgatgcaatgtcacggctcagaaccgtggtggcatccagatgggtaaaggtagtggcaggggcggggtcggtcaggtcatcggcgggaacgtagacggcctgcaccgaggtgatagagcccttgcgggtggaggtgatgcgctcctgcagggcacccatctcggtggccagcgtgggctggtaaccaacggcagagggcatacggcccagcagtgcggacacctcggaaccggcctgtgtgaagcggaagatgttatcgatgaacagcagcacgtcctgattcttcacatcgcggaagtattctgccatggtcaggccggacagtgccacgcgcatacgggctcccgggggctcgttcatctggccgtagaccagcgcggtcttgttgataacgccgctctcggtcatttcgccgtacaggtcgttgccctcacgggtgcgctcgccaacgccggtaaataccgagtaaccgttgtgctcggtggcgatgttatagatcagctcctggatcaggacggtcttgccgacaccggcgccgccgaacaggccgatcttaccgcccttggcgtaggggcagatcaggtcaaccaccttgatgccggtctcaaggatctcggtggtggactgctgctcctcgtagctgggagcgggacggtggatgggccagtaggcatccggggtgggggcgggcttgttatccacaggctcgcccagcaggttgaacacgcgccccagacactggtcgcctacgggcaccttgatggactcgccggtgtccacggcatctgtgccgcgcaccagaccatcggtgctgctcatggcaatgcagcgtgccacattgtcgccggtcagctgagcaacctccaccaccagcttctggccgtggttgtcgatctcaatggcgttgagcagctccggcagctcgccatccttgaactggatgtccagcaccgggccaatgacctggatcaccttgccgatatgtttttcggacataggctacaactccttcttgataggtttttccgctcaagctcccccttcgggggagctgccgccgtcaggcggctgagagggtcttagttctccgcgccggccacgatctcggtgatctcctgcgtgatagcagcctgacgggcacggttataatacaggttgagatggtcgatcatctcgccggcgttcttggtggcagcgtccatggcggtgcggcgggcggccagctcactggctacgctctcgcacacggcaccgtagacgacacctgccacatactccgggatgatcgcgctgaatacttcctcgctgctgggcttgtacaaaatctgactgcggcgcgcctccgccttctgctgctcggtgggctccatggccagcggcagcacctcgatggagactgccgtctgggtcatcatggaatcgaaccgggtgtagcaaagctttacggcgtcaaactcgcccttgcggtacccttcggtgatctggcgcgccagctggaagcactgtcccaccgatacatcggcggccagcagcacttcctgcgtgaacagttcggcttcgtggtgggcaaagtactctgccgagcgcttgccgatgggcagcacctccacgttgccgctttcctgtgcagccaacttgagcacattggcgttgtaaccgccggcaaggccgcggtcaccggcaatgaccaccagcagcgtgcgcttgatctcgctgcggcgcagataggggttgcgggcccgggggtccgctgccgcgatctcggtcagggtcttgtacagcgtttcaaaatagggtcggctgtgttcgacccgctccttggcacggcgcattttggaggaagccaccagctccatggccttggtgatctgcatggtgctctctacgcttttgatgcgcagcttgatgtccttcatggaaccagccatgcgttacgcctccttccctttaatgcgccttgacaaagctttcggtataccgggtcagcacggctttgagctgctcctcggtgtccttatccagattgccggtggtacggatggtgtccatcacggcagccccggcggcatcgttgtccagatactcgtacaggctcttctcgtactctgccacatccggcaccttgacgttgacaaggtaatcgtggatggtggcgtacaggatggcgacctgcttttccacaggcacgggcgcggagcggttctgcttgagcacctccacgatgcgctcgccctgtgccagacgcgctttggtgtcggcgtccagatcagagccgaactgtgcaaaggattgcagttcgcggtactgggagtagatcagcttcagggtgcctgccaccttcttcatggccttgatctgggcgttgccgccgacacgggacaccgaaataccggggttgactgccggcatgacgccggagtggaacagctcggtctctaggaagatctgaccatcggtgatggagatgacgttggtagggatgtaggcggaaacgtcgcccgcctgcgtctcgatgatgggcagagccgtcaggctgccgccgcccagctcgttggaaagcttggcagcgcgctccagcagacgggagtgcagatagaaaacgtcgccggggtaagcctcgcgtcccgggggacggcggatcagcagcgacagggcacggtaagccaccgcgtgcttggaaaggtcatcgtagatgatgaggacgtgcttgccctgctgcatgaagtattcgcccatggcgcagccggagtaaggggcgatatactgcaagggagacagctcggaggcggtagcggacaccacgatggtgtagcccatggcaccggcttcggtcaggctctgcacaaggtttgccacggtagagcgcttctgaccgatggcaacgtaaatgcagatgacgtccttgcccttctggttgatgatggtatcggaagcgatggtggtcttgccggtctggcggtcaccgatgatcagctcgcgctgaccgcgtccgatggggatcatggagtcgatggccttgataccggtctgcagcggctccttgacgggctggcgctcgatgatgccgggggcgcggctctcaatggcgcggtactcggtggtctcgatggggcctgcgccgtcgatgggctggcccagtgcgttgaccacgcggccgatcatggcatcgcccaccggcacggaaaccaccttgccggtgcgcttgacgatgctgccttctttgatgccggcatccgagcccagcagcacgatggaaacggtattttcctcaaggttctgggccataccgtattcgccgttgtcaaactggagcagctcgcctgccatgcacttttccagaccgctggcccgggcgatgccgtcgcccaccataatgaccgtgccggtctcgctctgctcgatggcattttcgtaatgcttgatctgcgcacggatgatcttggagatctcttcaggtttcagttgcatctttgtttgttcaccactcaattcataatagtcatttcgggtggaaattcgttctgtgctctgccccgtttgcaaagggcaggggaatgttacagagtgaccgccgcaatatcccggcgcagggaggcaagacggttctggacggtgccgtccagctcggtgccctcgatatccagccggataccgcccagcaccttggcatccaccttggttttaaggtcgatggtcttgccggtcaggctttccagcttggcgtgcagcgccgcgcgctgctgctctgtcagcgggacagccgagatggccgtagcttccagaatgccgtgcgcctgattgtagcggatgcggtaagcccgtgcgcagccggacagctcccgcagggtgcccttctcgcacaggatctttaaaaagttcagcacatagaggtggacctgcccgcgcagggcttcgtccagcaggccgcagcgctcctttttggggatgctgggggtgctgagcagccgcaggtagtccgggttttgcttcagaagctgttgcacctcgtcaagctcgcccagaatgcgggtctccagcccttcctctgccgccagatcgtacagactgccgccgtacatctttgcagtttcggtcatgatgcttcacccacgtttttgataaattcgtcgatcaggtccttgtggtccttctcgctgatctcgcgctccaccaccttggatgcgatctccatggcaatgccgccgatctcgtccttgacctcgttcacggccttcttgcgctcctgcgcaatgtcagcctcagccttctgcttcagggcagcggcctgtgcgcgggcctcgcccacgatctcttccgagcgggcggtggcggtcttttgcgccgtagccacgatctggttggcctcggtgcgggcgttctgcaggttctgctcgtactccgccttcatggcttcagcctcggtgcgcagtttctgcgcatctgcgatctcgctgtcggccttggccttgcggtcggcgatcacctgtttgatcggcttcagcaggaactttttgaagatgaccagctggatcatcaggttgcagatctgggccagaaaggtccagccatccagcgtgatcaacgcctgatacagttccataagcgtctcctttcgttattttttcggatcgggaggcttatgccagatacttcatgaacataccgggagccaggaagatcagcagcagaccggtaacaaagccgtagataccggtggtctcggaaagggcaacaccgaggatcagggtgctggtaacgtcgctcttgcactccggctgacggccaacggcctcacaggcagcagcagcagcgttgccttcgccgataccggggccgatacctgcgatcagtgcgcagcctgcgccgatgccgcagcctgccaaagcgataccacgagccagatactggaaatcagtcataagatttgtcctcctaaaatgtgtttgtgttttgggggatgccggaaggccttagtcctcaccggcagcacgtttgatgaagattgtggtcagggtacagaagatgaacgcctgaatgcagccgccgaaccagtcgaaatacaggccggtaaaggccgggatgccgatctggaacagctggatctgactcaggaagcccggcagccagccaaagatgacgtggctcaggcttgccagtgcccagtacagcagtgtggagatgaccgtaccggacaggatgttgccgaagtgacggaacgccatgctgacaggggtagagatctccgacagcacattgatgggtgccatgataaagatcggatcgagcagacccttgaggtaggccagaatgccgttcgttttgatcttgtagtacatgatcagaacaaacaccacgatggcccacgctgcctcggtgttcaggtcggccgtggggctccacaggccgacaacgctgatcaggttgcacccgatgctcagtgcaaaaatagcaccgaccagggggatatactgatcgaagtggaagcccatgttgtcgtgcacgaactgctccagccgcgttacgatgaactcggctgcggcctgtcgtttggacacattttccagcttgaggtcgtgccccagccagatggcaaaacccgagagcagcgccatgacgatccaagtgcttaccaaggtctgggtgattttaaaatcacctagcagggggatattggtgtggatggtatacaggatctttgcgccgttcagttccatttattcttgttcacccccttcgtcacggggctgcaccgcagacgcctcagcaggggcggggtcatcttccacagcgatgtccaccggctcctgcgggggcgtgagcggcttgtacttcccggttatctggagataatagatcgtaactctggggaacagcagcggcagaacgcctgcaaacgcctggaagcacggagccgcaatggctatgatgatccacaacgcctgcagcagcatccttgtattataggatatctgcagctgcgctttacgctttttttcgtccggctcgtcaatgaccttctgcaccacgaagcagatgccggcaaagttgccgatagccaccagcgcgccgatgatgccgcccagcagcacccggtagtcaaagaccacccagcccaccagatgcagcgctgcaaacactacccacatcacagcggtgcaaagagacacgccgcaggcgatgcgcagcagctcctttttggattccggctgcaatttcataaaaacggacctccattactggtgggagttgaagcccacccgatgatttttttcgtgcttggagcgctccagccgttccttgcagaacacccagaagttctgcgccccggcggcaagccccagccccacagcgggcaaaaacagccattccggccagccccagtgctccacagcccaccagcatccggcaaggcagagcaccagcggcagcagcatattcagccctagctgggtcagccagaccagatcttccaaagccttgtaccagcccttcaagttctgcgccgctcctttctgcgggtgccgcccgcattccagcatttggaaaaaatgccggagacggacaggcagccaaaaagtctatgccctcagtatacttcaaagcgtcggatattgcaatcaattctccaccgaaatatagtaaaatttcatagtttgttaagactgattccataaatgtgcacctataacacacattgtgcgccgatgattgcatcattgcacaaacttttcagaaaagtttgtgcagagtgtaaaaaacagtgaaaggtcggctcccggcggggaggacgatttaaaatggcttccgctgtgctctagccataattagaggaattaaatttttatttcgcgtttgtcgcgctctgcggagcgctccaaacgcattttcacgggaggggtcgtaacgaaaaacggcagctgccgttttcctttggggcttttccggtgaaaagggaatttcggagcgtccgcagacgctccgaaattccgaaactataaataattcttccttgaactatgtgcagagcaacgcggagcacattttaaatcgtcccacgcaaaaggggctgccgcacgtttgtgcggcagccccggcgggtactttggaattcaggcgcttaccagaggtttgcggtctcgttgtacagaccctcgtagctcttggcggaaacgtcccagctgaaatcgcactccatgcagtgacgcacgaggttcttccagttttccttgttgttgtaggcatcctgtgcgttgcagcaggccacatacagctcgtgggcgttgtaaccggcaaaggtaaagccgttgccgtcacccatggtgctgtcgtggatggagtcgcgcaggccgccggtctcgcggacgatgggaggtgtgccgtagcggcaggccaccatctgtgccagaccgcagggctcgctcttggagggcatgatgaaggcgtctgcaccggcgtagatctcctgcgagagcttgggctcaaagccgatgtaggtgcctacgcggcccgggtgacggccgcacaggtcagagaagaagttctcgtactggctctcgccgctgcccagaatgaccagctggatgccgcggtccaccagaccgtcagcaatgctctgcacaaggtcaaagcccttcatgcccaccatgcggctgaccatgccaaagacggggctgccgtctttatgcagaccgaacctgtcctgcaaagcttccttgcacttggccttgccggtctcaaaggtcttgatgctgtaattgaaggggatgttcttgtcggtagcggggtcgttggcgtccatatcgatgccgttcaggatgccgcacagcttgtactgtttttcacgcagcagagcgtccagaccgtagctgaaccacgggtccaaaatctcctgtgcgtaggtggggctgacggtggtgatcttgtcggcggtctcgaaagcgcccttcatgaagttggcgcagccgtcgtactccacgatatgctggtcccggtggccgatgccgcaggtgtcctccagaatatcggtgccgtacttgccctgataggcgatgttgtggatggtgaacacggtcttgatgcggttgaacttgtccagatgacgatagtacaggttcaggtacaccggcaccagagcggtctgccagtcgttgcagttgatgatatcgggggtgaagtcgatgtagaacaaagtctccagcacggcgcgggagaagaaggcgaagcgctcgccgtcatcgtagaagccgtacaggccgcggcgcttgaagtaatactcgttgtccaggaagtagtaggtcacgccgtccacatcggccttgaacaggccgcagtactggctgcgccagcccacaggtacggagtagttggtaacgtattccagcttatcgcggtacttcaaatcgccatataggggcatgatgacgcgggcgtccacgccgtccttgaccagcgctttgggcagggcgcctgccacatcggccagaccgccggatttggcaaagggattggcttccgaagcagcatacaggatcttcataggattcgctccttccatgatacagacagatgttcgcgctccccgccgccataaaaagcggcgcgaaccttgcatacaaaagagcaggcgggggcacacaggtgcccccgcccctctcaagaggggctaccggggaggaagccgcccctatggatattgctcgatcagacggtgtggttcttctggacgtagaccgggaagctctcggtgccggacagctttttgccggcggtgatcttcacgttcttgtcggtgacaacgcagtccagctccacgttgggctcgaccacggtatcctgcatcaggacacagttcttgaccacagcacccttcttgaccttgacgccgcggaagagcacgcagttctccacggtgccctcgatgacgcagccgtcggccagaatagaatccacgaccttggagccggtgacgtaacgggtggggttatcgtcgcggatcttggtgtagatggggctgcccttggggaacagtgcctccagattgcggtcatcgatcagcttcaggttctcgtcaaagtagctcttcatgtcgcagatatgggcaacatagccggtgtactccagcgcatggatgttcaggatgttgacgttgtgtgccagaatgtcgcgctcgaagtagatcaggccgcgggcggtagcgtccttgaccagcttgatcagggtctcgcgctccagcacatagatgttcagatccagattctgcacaccggagcggtagtcgttgaacagcagctcggtcacgcggccatcggcatcaatggtcagggtgtagttgtcgttcttgcggccctcggggatctcggtcttttgataggccacggtcacatcggcaccgctggcctgatgggcagccagcagggcgttgaagtcgtagttgacggcgatgttggcatcgctcatgaccacatacttctccttctggtgctcaaggaagctcagaatggagcccagcgcctccacacggccggagtagatgcgcacgcccttttctgcaaagggaggcacgatgttcaggccgccgtgacggcgggccatatcccactcgcggccggtgcccagatgatccatcagggagtggtagttcttacgcaccacgatggaaacgttggaaatgccgcagttggccatgctggacagcacaaagtctaccatgcggtaacggcccgcaaaggggatcgaggccattgcgcgctcggtcaccagctcgggaacggtattgtcatagctgttggggaaaatgatacccaacgcattggtgttctgtctcagcatacttccacaccctccttgacggattcaaacacttttgcgccctccttgacggtagcgcctgcgccgatggtcagaccggtgccaacgtgggcaatagcgccctcgccgccgacctttgcacctgcgcccacaacaacgtcctcagcaaggatgcagcgcttgaccacggcacctgccttgaccacgacaccgtccatcagcacggcgtcctcaacggtagcgccctcttccacaacaacgcctgcgctcagcacagagtgcttgacgttgccgtagatcttgcagccctcggtgatgagggagtcctgcacaacggcgcgctcgccgatcttctgggcgggcagcacggggttgcggctgtagatcttccaggtcttatcaaagatatcgatgccggagttctcggggtccagcacttccatgttggcttcccacaggctgtcgatggtgcccacgtcacgccagtaaccggcaaagcggtaagcgtacatcttgcggccgtcacgcagcagggcggggatgatgttcatgccgaagtcgttcttggagttggggtcagcctcgtcctcgatcagatacttcttgagcacatcccagttgaagatgtagatgcccatggaggccagattggacttgggcaccgggggcttctcctggaactcggtgatgcggtcggtctcgtccgccaccatcaggccgaagcgggaagcttccttccagtccacttccataacggccacagagaactctgcgcccttttccttgtggaagcgcaggaaatcggcgtagtcctgtttgcagatctggtcgccggacaggatgatgacgtattcgggatcatagctgtcgatgaagccgatgttctggtagatggcgtttgcagtgcccttgtaccagtcggtgccgtttgcctgctcgtaagggggcagggtgtgcacaccgccgtgcagacggtccagatcccaaggctggccgttaccgatgtactcgttcagcttctggggctggtactgcgttgcgataccaacggtgtcgatatcggagttgacgcagttggacagcgggaagtccacgatgcggtacttaccgccgaaggacaccgcaggttttgccgtcttttgtgtcagcgcgtataagcgcgagccacgtccaccggcaaggatcattgccacgatttcttttgccatagctttattctcccctttagcatttccttattggaaatgatagtcaacagttcagaatgttcgtgcgtgcatccgtgtgggcatccttattccttgggtgcttttgctttgcgggtgcgctttgcgggtttggtttctgcttcggtctcagtttttgcttttgccgcggtctttgccttggcggcggtcttttttaccggcttgtccgctgcggcctcaggctttgccttggacttggcagcggtcttttttgctttttccggtttttcatccgccgtttcggcggccttggccttggtggtgcgggtcttttttaccggcttgtcggcatccttgacggtggcctttttggcggtcttttttgccggcttgtccgcgctgtcctctgctgccttgcgggtgcgctttgtgggcacctcaaagtacaaagtgctcatgggcggcagggtaacggtgatgctctgctcaaagccgtgctgcggctttttgtgggtacgcaccggcttgttgtgcacggtaccggagccgccgaaagcggcatcgtcactgttcaggatctctttataggtgccggacaccggtgcaccgagggtgtagccctcgcgcaggacggggttgaagttgcagatgacaaggatctgcttaccggcggcatccttgcgcaggaaggcgatgacgctctgctgcgagtcgtccggtacgatccactggaagccttcccagctgtaatcgatctgccagagggcggggtgctctttatagaaggcgttcagggtgcggacgtagttctgcagctcggcgtgcttgtcgtagtccagcagcatccagtccagctgctttgcctcgttccactcggcaaactgaccgaactcctgtcccatgaacagcagcttcttgccggggtgtgccatcatgtagccgaagaaggtgcgcagattggcaaacttgtcgtcatactcgccgggcatcttgttcagcaggctgcccttgccgtgcacgacctcatcgtggctgatgggcaggacaaagttctcgctgaaagcgtagaagaagctgaaggtcaccttgttgtggttgccggagcggaacagcgggtcggtcttcatgtagctgagcatatcgttcatccagcccatgttccacttgaagttgaagcccagaccgccgtccgaagcgggctttgtgaccatgggccacgcggtggactcctcggcgatcatgtacttgtgggggtgacggcccagcacggtgttgttcagcttgcgcaggaaggcgatggcttccaagttctccttgccgccgtccttattgggctcccattcgccctgcttgcggttgtagtccagatacagcatggaggccacggcatccacgcgcagaccatcgatgtggtactgctccagccagtacagtgcgctggaaatgaggaagctctgcacctcgttgcggccaaagtcgaacaccatggtgccccactccttgtgctcgccgcgcttggggttggggtcctcgtagcaggcctcgccgtcaaaattgtacaggccgaactggtctttggggaagtgggcgggcacccagtccatgatgacgccaatgcctgcggcgtgcatcttatccacgaaggccataaaatctttgggggtgccgtagcggctggtgggtgcaaaatagccggtgacctgatagccccagctgccgtcaaacggatattccatcaccggcagcagctctacatgggtgtagcccatatccttgatgtacgggatcagctcgtccgccagctcggagtagttgtagggcttgccgccctccttcatcttccagctgccggcatgcatctcgtagatattcatcgggccgttgatcacgtccgcctttttctgtgcggcctgccaggtggcgtcgtgccatgcaaagccggacagatcgtagaccttgctgccgttggacggccgggtctcggcgtggaaggcgtagggatcggccttgtagacaaggtcgcctgcacgggtggttacgcaatatttataaacatcgtattccttcatgccgggaatgaacaattcccacacggaatcgccatccaccttgtgcatgggatggctgccgggcttccagctgttgaagtcgcccacaacactgatggctacggcgtgcggtgcccatacgcggaacacaacgccggattccccgacccgtgtttccagatgtgcgccgaagtagcggtaagcctcgcagttgttgccctgcttgaacaggtacaccggcaggtccgatgtgttgctctgaatcttttcttcggtcggtttcataaactgctcctccccgtgcggaagccgaaagcggcttccacagctttgtactcttttatattaaaatgttttgaccagttttgcaagactttttgtccgaaaaacaaatacaattaacacaaattttctggcattctctgtatgttgtgggcatatcatccaaaatttgcagctcaacatcgtgtaaactgctcatttgacaaacggtttcagcgaaagcgttgcggaaacgggaaaggggtcggggaaagcccacagactttccccgaccccgaaataaaaatagttttctacttaacatcaaaagagaccgctgcacagtttgtacagcggtctctttgcgtggttattgtgttttgtttacggctcagcccacaacgtagacattgacctgaatggcaccgttgatgacgctttcggcgtaggtctcgtagaacaggtctacaaggatctgccccttctggacggcgatgccggtgtcggtggctacggcatagccgtagacgaacttgccgtcggtggaggtgatgtagagcttggtgccgtaggggatcacgtccgggtccacagccacggtgccatagcccagacccagaccggaagagcccttgccggtacgggaatagtagccggtggccttgccggtgagcaccttgctataagaggtgggggcgttggtggtgccgtccgcgccggtcaggggggacactggcgcgcctgcgccgtaggtcttgatgacgtggtcggtgggctccaccgtggtggtggtatccacaacggtgctgttctccagctcgccgtccacatagcggtcacgggtggtcacggtctgctgaccggctgcgccgtgctgcaccgtggtggtgcggccggtgttgcggaagtacaggctggtgtagacatactgggtgtcgtaggggatggcctgagtttccacccgctctgcgtagtccacgcggtggaccacgatcttgctgccggcggtcacaacgtgatccagcgccggctcggtgtagtcgtccccttcaagggtgataccggcgcgctccagtgcatcggctacggtgccgaacaccagctttacagggtactcctgcccgtcggcagtgatgctgacagagaatgcgcgctcgatgttcagggaggcaagattgccgctgaacgcggtgtagtagacctcatcgccctcctcagagcggatgccggaaaggtgcatgacctgtgcgggggaagcatcggcatcggtcagaaggacctgccgtgcaccattggagtcggtgacgtaggtcagccgcagatttgcagcggtgacgccaagggtagccacaaggcataccaccatgacacaaaatgccagcacacggggagatactgcctgctttgcggcagtaactgctttcttcaatttaacggaagcgatacgagacaactcctctctttgtcgtatttggcgcggccgcgggtctgtattgcatcagcaccccggccgcccggactgtggctgctctgagtataagcgtctcacagtcaaatacgatgctctcttcgggtaaaaagaatgagcaccgtattacaggttggaatccgcttcgagcagaccacaaaactgccccggcacaggccgcatctgcccatgccgtgccgtacgcaggacggctttttacttcatccagatagaatttaaacgctgcaacgttcgttgcacaaacgctattttaccagaccgtaaagcgtctgtcaaatttgtgtcttgcactttgttagatttataacattattttttgtgcaattttcacagtgtttcttttgatattttggtttttaggtggtttccttctgattttttccttttttctgggggcaattcgttcatgaatttttaacatttgcaccggctcttttctctgcgaataaggccgcagcagcggccgctgcgcccaaaacaagctgccccacatcgcgggttttgcatggaaaacctgcaggggaattacccggttccggcaggggagaaaagctcgcatttccggtgccaaaaccccgtttagcaaaatgccgaagaacagaaaatttcacatttttagtacacactggatagttttgcgcccccggcggtacaatcgggacagcaaacagaaaaggaggttttgcatggagatcgaaatccttgagcagcagtgcggcggcaccgaatttgtgccccggccgcaccggctgcaccttggcgcacagaacgccgagggggtggaccggctgcagttcatcctgcccgcagcgtgggcggggtgcaccctggcgctgtatctgcgccgcagcgatggggtgcagctggccgccattccgctggacgccgacgacagtgtgacggtggaccgccgcctgaccggcagcgtgcggggacagtggatgctggccgccataggcagcggcggttacaccgcctacacccgccccggcagctacgatgcgtacgctaccctgcctacggacggcggcagtgaggagctgccgccctcggtgtacgagcagtttgtggcgcgcgtgctggaaagcgcacacgccgcagcggaaagcgcccgccgtgccgagaacggtgcggcagataccgccatgcaggcggcactggcgcaaaagactgcggacaaaattctggccgaccgtaccgatgccgaggccagcgcaaagcgggcggaggctgccgcactgcgggcagaaagctatgcacccaccggtgggcaggtgctgagcgtgaacagcaagggcggcgcggtgcagctgaacgcacaggatgtgggggcggtgccaagcccggcgcagcctttgcccggcgagatggtgcgcattctcagcgtggatgccgccaccggcgcggtgcagaccgataccaccccgctgccggacctgcgcccctatgtgcgcagcgagaccgtgcctacggcggcaacgcccggcgcggtgcgggcagacgggcagtacggcgttgcggtgcgggcagatgccaccctgaccaccgtgcccgccacggcggcgcagctggaccgtatgaccgaggcctatgcgcccctgaccccggcgctgctgccctacggcgtaaaaaaggcgctgaccagtgccgccggagcagcaggctggtcggcgcaggaaaaggccgccgcactattgcagctgggcgcggacgaccggttctactccaaggccgaggcagaccggaaattcggcatgggctgcaccctgccgcccgccaccgcagccgtgctgggcggcgtgaaggtggggcggggcctgaccgtgagcgcagacggcacactggaaatgacggcggaaaaccttgacacggtgctgggctttagcctggcagaaaaactgaatcaactgagaggagtgacggacatgaacggaaagcttgtctacacaagcgacggtgcagcgggcaaaagcaacaagacgatgactgtgccggacgaggtggattatattgtggtaaggatggcggtccctctggaatgtaccacgatcgctaccaccggcggagtagccgcagcggcggctgcggactacggctgcacccgcatcgtgcggggcggtacggcggtggccatagtgggcggcggcaacacctacaatctgcgggacggcgtttactgcaagggcgaagcactggtgaaggtgagttttgctgcgaacggcacggtgaacatcggcgtggtcgatgtaaacctggcgagcaatgacaacgcttatcccttcaacgtggagggctaccagtatgtgtaagggcggtgcagcatgaacgagatgaccatccggctggacagaaacggcgcggcagcggtacccggcgggcagctgctgctggggtatgcgggcaaccggggcaactaccggctgcgcatcgagcagcggggcgagtggaaggggctgaccgtgtgcgcccactggcacacccccggcgcaagcgcggctacgctggtggaaaacggaatcctgaccgtaccggcggcggtgacggcagtgcccggcgcgggctgcctcacctttgagggcacggacggcagccgcaccgtgaccagcgctgatgtgcggtgcaaagtatgcgccaacagcggcacggcagagggcgcgatgcctgccccggctacgcctgcgtgggaggcgctggtagggctgctgggtaccggcggcattaccgccgcggaaaagcgggcggtgctgaccgtgctgcgcacgctggcggcgggcaatgacgcagctatggatgcctgcgaccgtctggcgacgctgtggggcaacccgcagccgccgaaggagaacgtttttgccgtgctggggcaggcgatccttggaaaaatgatcttagggaggaacaaatgagctacgtaaaacagaattttgtggacggccagaccctgacggctgcccagctgaaccacatggaagcaggcattgccaatgctgccggaacgcagggcgaaaaaggcgacaagggagaaaagggcgaccccggcccggcgggtgcaaaaggtgacccgggcgagggctttaccgccaacgcaaaggcgctgctgctgaacctgtttgaaaatgcagcctataagaccgacacgatgcagcccaccctgaatgctctgcgtgcagagtggggcggcagtgcacaggaagttccggtgcagagcgtgagcctgagcgccgtgaccatgaccctgaacgagagcgagagcaagaccctgacggccaccgtgctgcccgcgaacgcaaccgacagggcggtggtgtggagcgttctgcctaccggctttgccactgtggcaaacggcgtggtgacaggcatcaaagcaggtaactgcaccgtgactgccacagcaggcggtaagagtgcaagctgcgcggtaacggtggaagtagtggagacagcacagctgatctacagtctgcccggcgagaccgtgctgacccagggactggacaccggcctgaagctgctggagcacgcctccaccgagacgccgcaatacacgatcctagtggatgcgaaagcgggggacgactttaatgcaaacacatggcctgccttcctgcactgcctgaccgagaccggcgataccggcaatctgcccggcttcaactccaccagcagcccgctgaacaataagaccgagttcgcatactacaactacggcggcgttactctgtcggacagcatcgaacacttcaagacccgcacacggtatgcggtgcagatcgacggcagaaaatatcgcggcggcagtacctactgcccgctgaccgagtggaaaaccacaaacggcacaatcatagatgtgccccagaccttcctgatcggtgcggcgcagagcgtggacggcagcaaaaagcagcagttctggtctggtacgttgtatcagtgcagggtgtataaaggactgctgagtgacgacaaggtgaacgattacatcgagaaggggtggtaaaatggaagtgtttgacatcaatggtcagatcatcagcccgctggcgggaaaaacgctgtacgttgcaggcgacagcatcgcttacggcaagagcagcgcaggcggctacggcaaatgtattgcagacaagtacggcatgaccctgaccaatgaagcagtggacggcgcaacgctgaccccgaatattaccgataaggtatacggcggcacccgtggctgcatcagcacggtagtgacaaactccacagcgctcgcaaaggcagattacattctgctggaaggcggcgtgaatgatgcctggaacaacgcccctgtgggtaccttgaccgatgggtttgccgctgcctacgatgaaacgaccatgaccggcgcactggagaagatgctggacgatctggcaacgaattacagcgacaagtgcgtggcctatgtattcccgcacggcgggatgtttgcaggcagcgaaaactggtacaagacctataagcctgccatccttgtggcgctgaaaaaatggggcgtgccctacgttgacattgcggagaccaccccgcctatgggaaaacacggcgtcagcgaactgggcgataagtacaccagcgacggcacccaccccaacgcagcgggctacgagcggttttatgcagagcccatcgcagcgctgctgaaacggctgtaagggggcgcacgatggcattgcaagcgtattctcttgcccgggacggcagcaccgccctctcgccgcacttctgtgtgcgggagttccgctgcaaggacggcagcgaccctgtcttcatcgacacggcgttggcagaactgctggagcgtatccgggagcacttcggaaaaccggtgacgatcaccagcgcctaccgcaccccggcacacaacgccaaggcaggcggggcaaagttcagccagcacctgtatggccgggcagcggatatccgggtgcaggacgtgagcgtggaggacgtggccgcctacgccgaaagcctgatgccggaccggggcggcgtgggacgctaccccgcgaaggcgggcagagccaccggctgggtgcacgtggatacccgggcagacaaagcccggtggagggggtgagcgcgatgacaggcatcatctcagccatcattgcaggtgcggtgaccctgatcggcgtgctgatcgccaacggaaaaagccaggcggtgaccgacaccaagctggaagaactgacccgggaggtgcgggagcataacaactttgcccgccgcgtacccattttagaagaacagatgaaggtggccaaccaccgcatcgcagatttggagaaagagaggaactgaacctatgaacgatacccattgcaaaatttctgccgccaccctggcacgcacggctgcgctggcgctggcactgaccaatcaggtgctgagcgcctgcggcaagcctatgctgcccatcgagagcgccaccgtggagcagctggtgaccaccggcctgaccgtgaccgccgcccttgtgaactggtggaagaataactccttcaccccggaggccatcaaggccgacggctatctggaacagctgcgggaaaagaagtaaaggctgccgggcaggagggacgatttagaatgcgcgccgcgctgctttgcgcatagtcagcggaagaattatttttaatagagcaatgccggagcgtctgcggacgctccggcattgcatttttacgggaaggatattggagccgttcccaacaaaaaactcctccggcgggttgccggaggagcattcatttttctattctaaacacggatgcgccgccctgacatggtgcgcagccgggcttacttcaggaactttgccacggcgcgggcgacgatgccgcccagaataccggacaccagaaattcggctacgccctgcacgccgaccagcagcactacgaacatgaaggggttggcagcgcccttgacggacaccagattctgcacatagtcgcagccgtagaaagccagcacgatgtagcccatgaagaacagggtgttcagggcgggtgcggtcatggcgctgaggatgtagctccaggtgcgggacttatccagcttttgcaggcccttgaagatcaggccgcagcacagacccatgagcacacgcatacccacgcacaggataaaggtgttcagcgggctgacctgaaacagtgcaccggtcatggcagatgcgccggtgatggcatcgtagaagctcacagcgccgaatacgccgcccagcagggcacccacggcggggcccatggtgatggcgcccacggcgatgggcagggtgaggaagctcatgtacagcgggcccacgggcacactgcccagaccgacaagcttcatcaccagttcaatggccaccagcagggccacacgagtcaaggtcttcgtattggtattcttcataattcagttttcctcctgctgccgttccgccctttttgtcggatacggcgcaaacctgcccgctctttgcgggttttaggtgaatattcaaatctttggaagcgcgtagttgtcagggcgtgttccagagaaaaatgcgttagaatctgtcgccggggaagcgcaccccggcgctgcggcgcgccaccgtgagcacccggctcaccgcgatgctggtatccagcatgcgggcgcacagctcctggtctccggcggtcatggcgcggtaaaaggcctcgaattctgccgcctgccggggacggtccccgttcaggttatagtgctcctccctgccctcgttgggatggaaggtcacgccgccacagtagttcggggtggatttttgcaaaatgtagccctttgtgccctgaatgatgcagcgggcaggggctgtgcagtccttggcggcaaggcttactgccttgaagccgctgtaatccatcatcagcacaccgctggtgtcgatattgcgctccatgttggcggcatacaccgccttattcggctcgccgaacagacccacgatgtagctgacgttgtacacgcccaagtccatcagtgcgccgcccgcgcactgcgggtcgaacaccggcggggtctgcccggcgcaaaaggcgtcgtaccggctggaatactggctaaagctgcactgcaccatgcgcaccgtgcccacccggggcagcagttcccggagtttggcgtagttgggctggtactgggtggtgatcgcctcaaagaggaacagccgcttgcgctgcgccagcgcagccagttcctcggtctcggcggcggtaaccgccatgggcttttccacaatgacgtgcttccccgcctccagcgccacccgggcatagcgggcgtgctgccggttgggcacggcgatatagactgcgtccacccattgcagcagttcaaagtaattggtggtgtgctgcgggatctgatattgtgcacacaactctgcggcctttgccgccgagcgcggggtgctgcacaccgcctgcacagtaaacggcgtgtgctccacaagccatggcaaaaattcctgcacgatcttacccgtgccaagaatgcccagtttcataatgctctcccttattcctcttgtcccctcagcctaccagcgcctccggctcgcggcgggtgcggcggttggggtacgggtgctttgcccgggggtgcccctgctgaccgtagtgtttgccgccgccatggctgcggccgtgctcctgcggggcattcagccggtacaacagtgccagccccttcatcagcagttccgggtcataggtcagggggtggcggcacagcggggtgacatactttgccagcccgccggtgaccaccagcgtagccggggtgcccagctcctcctcaatgcgctgcaccatgccgtcaatgagcacggcggtgcccagcaccgagccggacagcatacagctttcggtattggtgccgatggcgtttttcggggagcccagatgcacctgcggcagctgggcgcagcgctcgcccagcgcgcgcagcccggtggaaaggccggggcagatcacgccgccccggaacacccggtctttgtccaccacattaaaggtggtggcggtgccaaggtctaccgtgacgaccggcagcggaaagtttgccgccgcgtaggcggcatccaccagcctgtccttgcccacggcgcggggctcgtccaccctcatggtcagcccggtgcggatgtccggcgaaacgatgaccggctttttgccggtgtagtgacgggcgcactcggccagtgccccggtgatctggggcactacgctggtaagcaccgcaccttcaaagcgcatggggcgctccggatggcggcggtgcgcaaaaattttatccatttcggcacgatattccgcagccgtgcgggtgcgcaccgtgtccatgcgcgccacaaagcatacacgtccgtcccggatgcccccaagggcgacggtggtgttgcctatatcaatggctaagatcataattctgttttccttttcaaagtaaaagaaaagaaccggtttgctctttgtcaagcgtattttaccgcatttttgctccggatacaagttcccggcaaagattttgttgtgctggtggaagttttgcattatactaaggtaagatatgtggaaaagaactgtttttccgggaggtaaacgaaccatggatctgaacggcaagtgcgtcctgctgggcgtgagcggcggtattgccgcctataagatggccaatgtggccagtgcactgcgcaagctgggcgcggacgtggaggtcatcatgaccaaaaacgccacccagttcatcacccctctcacctttgagaccctgaccggccacaagtgcatggtggacacctttgaccgggatttcaagtttgaggtcacccacatctcgctggcaaaaaaggcggatgtgatcttagtcgcccccgccaccgcaaacgtcattgccaaaatggcgcacggcattgcggacgatatgcttaccaccgtggtgctggccgccaagtgcccgaagctggtagcccctgccatgaacaccggcatgctggaaaaccccatcacgcaggataaccttgccacgctggagcggtacggctttaccgttatcccctccgaaagcggcgtgctggcctgcaaggatgtgggcagcggacgcctgcccaaggaggaggtactgctggagcacattctgcacaccatcgcccgcccgaaggatctggcaggggtacgcgtcgcggtgaccgccggccccacgcaggaggcgctggacccggtgcgctacctgacaaaccactccaccggcaagatgggctacgcccttgcccgcgccgccgctatgcggggcgccgaagtgaccctgatccacgggcagaccgcgctgccgccggtcaagttcaccaccgatgtgccggtgaccaccgcccggcagatgtacgaggcggtgactgaccgctttgacaccaccgatgtgctcatcatggccgccgctgtggcagactaccgccctgctaccgtggccgacgacaagatcaaaaagaaggagggcgacctctccatcccggtggagcgcaccgaggacatccttggcaccatcggcccccgcaagacccaccagttcctgtgcggcttttccatggagacccgggatcttgtggaaaactcttccgtgaagctggccaagaaaaatctggacatggtggtggccaacaacctcaaggtggccggtgcgggctttggggtggataccaacgtggtcaccttcatcaccccggacggcacccgggagctgcccctgatgagcaaggcagatgtagccgatgccattctggacgagattctgcggcggcgggcaaagtaatactgccgggattttgttgtacacatatcacaaaattcacaaaaaaattatggttctttccgaaaattcggccttacctgtttattttatgctgcaaaaattatataataagagtgtgtccccatatttggaaggaatcggtctgcgctgcagccgttaatatttggaggagagccttactatgttcatgtactcggattatagccagcatctgctggaccatgtaaagaagatccattttatcggctgcggcggcagcggaatgtacccgctgatccagatcttggctgccaagggctacgagctgtccggcagcgatgtgctggacggcagcatcatccgctacgagcgggagatgggcgtgaaggtcagccttggccacaatgcggataacgttgtcggtgcggacatggtggtgtactctgccgccatctccaaggataacgtggagctgaacgcagccgcctcctacggcattcccaccgtggagcgcagtgtgctgctgggctatgtgagccgcctgtacaagcagagcatctgcgtgtccggcacccacggcaagaccactaccacctccatgatcaccaccgcgctggaactggcaggccgcgacccctctgccgtcatcggcggcaagctgcccctcatcaacggctacggcaaggccggcaagggcgatgatatcgttatcgaggcctgcgagttcgccgagaccttcctgaagctgaccccctacctgtccgtggtgctgaacatcgacaacgaccatctggactactacggcagcatgggcgagctgaagttcgccttcaagcgctttgccctgatgacccagttcatgatctttgccaacgctgacgacaagaacaccatggacgtgatgtacacgctggaccgccgggtgcgcacctttgccatcgacaaccacgccgactatcgcgctatcaacatcaacgagtataagcccggcttcttcgagttcgacctgaaggagtggaatacgaccgacaccacccgtatccgcctgtccgtgcccggccgccacaacatttataatgcactggccatgtgcgccgtgtgccgctttgtgggcctgagcgcagagcagtgcgccgaggctgccctgaacttcaagggcgcaggccgccgctttgaggtgtacggcgagtgcaacggtgcgctggtcattgatgactacgcccaccaccccaccgagctgcgcgccaccctgaacaccgccaaggagatgggctacaagcgcctgatcgccgtccaccagccgtttacatacagccgcaccaagatgctgttcaacgactttgtggatgtgctcaagatcccggacatcacggtgctgacccccatcatgggcagccgcgagcccaacgaccccaccattaccagcgcaatgctggcagcacagatccccggctctgtgctggtgaacagcctgcaggaagccgccgactgggtaaagcagaacgcccagcccggcgatctggtcatcaccctcggctgcggcgatatctataaagccagcaagatgatggtggaaaaggatcagtaagctgatttaaataattataaacacaagaagcgccccgcagccattcggctgcggggctattgtaaaacccaaatgtccgcgaaatgttacagcggccaaaaaatttcattgaaaatcgggggtgaaatgttacaacgctcggacatttcaaaattattattcaactacccttaatcgagctacaatacttgtttttctaaaatagcgaaacgaaacatgaggaactataatcgccacaacgcaaataacaattccctctaatatcaacggaaaaatcgtaggctgtattgtaaacagccataagtcaggttgattaaagaaagtaggaagaattgtatttgcaacaataagagagagaggtaaacccattacacaaatcagaaatgcgtaaaacaatccctccaatacggtcaatttgttaatttgttttttcgtcattccgatgctctctaatgtagcaaattcccgttgccggtttataatgcccgttataatgatgttggaaaaattcacaagcccgatacttcctaatagaaacccaataaggccacctatgataaaaatagtttgttttaatccattcatagtttgtgccaatgtttcagacgatgcgtattcaacggtaggcaaagaattgatgtactcggtcgctggcaaaaagtgttctttttccacatcaaacacataactcattatggctggattgttatacaattccacaaacatctcattactcatatagaaaataggacaatcgccgccaacatcagtgtagccaacattcttacccggagattctaccaatgaaaaatcaaccactgcacgcgcaattaccgaaaccgttttataaggcaatccatctttgtaaatggtaacttcctgattgagcggacaaagaaattcaggagattcatttgggttgatcgctgaaatttctataacatagtttccactttccaaatatgaggttagttgctgtatatctgtttctccctcaatgaaattcaatttaggaagtattgatttttctaccccgtaaatattgcaaagaggtcgataatcaacaccgagttttactggataagttctgccatcaaccataccacttcgtataaggtgattatcttctgtgtattcgtctaatacttccgtgaccaaactaccataatcataagtaacactgacatcatccaaagtgtttttataaattcgacttccgttcagcacaggaatattattttcaatatcagatatgatttcattactaacagaatcatctttaaatcgaaaaccttgcacattagaaaatgtgtttgggcttgccacaacaaaatcaaatgaggtaacagaagatacatattttttaacatcaacactatttccgattgcgattgcactgtttaggagaataatgcagagtatcatggataagacgataaatatggtacgctttgaatttcttcttaaatttctccatgccatttctgttattctattcttaaacgaaagacgattcttgttggcactatgataattgtctttttcatagtatctagttgcctcaatgggcgaaatcgtagctgcaattttgaatggtttctttatactcacccaaacagtaatcgcactaaatatcccggcaacgacaaaaataataggattaaaactcaagttcacagaaagattgtgatactcgcctttcataaaattaagaatccacggaagcataagtattcctactatatatcctaaaatcaacccaatagatatagcaattatagacagccaaaatgcttgcttataaacaattcgcttgatttgcttctccgttgttccgattgttcttaataagccatatttctttatttcttgaacaacagaaatctcaaaaatattgcgaatgagcaaatagcccgttattacaaaaatcataataaaaaacagggctgctattatggcaatccaatttacagatgtaccagtggacgggctggttcccctaatttgcaaaatagttgtctgtatagactggatcgctccaacacataaagtcgttacagaagtaaaaagcattgatgttaaaacgattgctattacagcaacaatatttcgtaatttgttggctttgaagcttctttgcgccagcttctttgtaatggcgctggtgtcattttcaaaaggccatgtcatagttgtatcacctccatatttgataagggtattgtaaaacctaaatgtccgcgaaatgttacagcggcccaaaaatttcattgaaaatcggggtgaaatgttacaacgctcggacatttcaaaaaaatttacggcgggcagccggaaatggccgtccgccgcattctattttgtcggcagcataatggaaaattccgagcccttgcccggctctgaaaccactttgatatagccgccttgccgcgttacgatctctcgcgccagatacagtccaatgcccacgccctgctgttcgtgtacttcttcctcacgataaaagcgccggaagatagcagcctgattactttcggaaatgcccttgccggtatcggctactttgatctccacatacatttcccacggtatcaccgacaccgtaatttttccacctgccggagtatacttcaccgcattgtccaacaggttaaagagggcttcggatgtccacttgctgtcatgggaaaaggtcaaattctccgggcagtccacagatacagcgattttctttttttccgctgcatacacgatcccactcatggcttgcgccacggtatcaaagaggcagaccggtttcttattcaactggattacgcccgtttccaaccgtgaggttttcacaagagcctgaaagagaaagtccagtttatctgtctgggtgcggattccacggataaaatcggtacgctccgcctcggtcataggcttttccagcaggatgtccgtcgccattttcagattgcttaccggcgtttttacctgatgggaaatatccgatacaagggtttgtaactcctgccgttcctcgtccacccggcgacggttctcctgcatgatctggtaaagtctcgccagccggtgcccgattctggcgagctgggtttcgctgtcctctggccgctggggtgcttcatttccggcgatcatgtggtctaaggtctggcacaggtcagtggtaaactgcgacagtcgctttccaaacgcctgcgtcagtacaaaaatccctacaatggcgcacagcagcagcgccccgcctgtcagcagcaccgcaatctgttttgtcacaagaaaaagagctatggtgatcccggacatggagaggacaagctccattgccacccggccaaacagccgctttaccgagaggttttgaaagcgcttggcgctcaagtataataccacaccccggggctcttgtcaacactttttgacatcttttttccaatttctttgcgcgggggtaaatgctcctgtttttctcctattataataacctccttttcttgacaaggcggcgggtagaacgtattatggagtcattccagtatcctgtattatgtagctatacttattatataaaggagaagcaccatgtcctgtgtcaacatccgcggctgccgcatcggggagggccgccccaaggtcattctgcccattgtggagcgcaccgaagctgctattctggaaaaggctgcgcagttttcaaccttgctggccgattgtgtggaatggcgggcagactggttcgagggctttcaatcccccgctgccattgcccgctgcgtacagaaactgcgggtcgccctgcgggacaagcttctgctggtgaccttccgtaccaaggcagagggcggcgagcaagcgctctcccataaggaataccttgcctttctgcatctgatcctcgataccgactgcgccgacctgctggacatcgagttcttcaccgccggggcagacctgcccaagctggtggagcaggcacattccgccggagtcgcagtggtgtgttccagccacgattttaccaagaccccgccccgggcagagctcgtctcccgcatggtgcagatgcagcaggccggagccgacctgcccaagctggccgtaatgccccggtgccgcagcgatgtgctggagctgctggccgccaccgctgagatggcagaccatcacccggaaacaccggtcattaccatgagcatgggggcgctgggcgcggtgagccgtctggccggggagactttcggctctgccatgacctttgccaaccccgggcaggcaagtgccccggggcaggtatcgctggacatcgtaaatgaagtgctggatgcactacatttgtaaccaacaaatcggaattgatataaaaaaggaggacacatagatgaaaacagtagttctttataatattatttcttttatcatcatcgttgctttgatttttgtcttaaggattgttagtaagagtaatttaagacaaaatcaacaacttgttattaaagtcattgcaattattttaattgtttgtgtgatagcgttcgtgctttttattgatgcaatagcatttggcattataggaccagttccaaattaacaattccagtttgtcgcacatcctgcccaaaacataaaccggaacgatcttccctttttcgggtggatcgttccggtttttatgttatattgaaaatcgttttatgccagcttggcttccagacgctcacggatggccttgataaagccctcgctgtctacggcggtgggggtgatgccctctgccagaccgcacaggtccttggtcatgatgccctcgttcagagtctgcagacttgcggcctccagtgcctcgccaaagtgcaccagctccggcaggttatccagctcgccgcgcttcttgaaggcgccggaccacgcaaagatggtagccatggggttggtggaggtcttttcgcccttcaggtacttataataatggcgggtgacggtgccgtgggcggcctcgtactcgtacttgccgtccgggctgaccagcacactggtcatcatggccagcgaaccaaaggcggtagaaaccatatcgctcatcacatcgccgtcgtagttcttgcaggcccagacaaagccgccctcgctgcggatgacgcgcgccacgatatcgtcgatgaggctgtaaaagtaggtgatgccggcagcctcgaacttttccttgtactcagcgtcgtaggtttcctggaagatatccttgaaggtgtggtcgtacttcttggagatggtatcctttgcgccgaaccacagatcctgcttcacgtccagtgcatagttgaagcagctgcgggcaaagctgcggatggaatcgtccttgttgtactgaccctgcagcacaccggcaccctcaaagtcaaagacggtggcacgctgctggctgccgtctgcgccggtgaacaccaactctgccttgcccgcaccgggaatgcggaactcggtgcacttatacacatcgccgtaggcgtggcgggcgatggtgatgggctttttccagttcttgaccaccggctggatgctgtcgatcataatgggtgcgcggaacacggtgccgtccagcacagcgcggatggtgccgttggggctcttccacatctcgtgcagcttgtactcctccacgcgctgggcgttgggggtgatggtggcgcacttgaccgacacgccgtacttcttgttggcgagggcggcatccatggtcacctgatctgcggtggcatcgcggttgggcaagcccagatcgtagtactcggtcttgaggtccacaaaggggaggatcagctcgtccttgatcatcttccacaaaatgcgggtcatctcgtcgccgtccatctccaccagcggggtcgtcatcttgatcttttccatagcagggttccctttcctctatcggttgtgtattttatgccccagcaggggcgttccggttacttgcggtaggcgtctgccagcttttcaaaggcgggcaggctgcgctttaccttttcggtgtcgatgcaataggcaaggcgcacatagccctttaccccaaagctgtcgctgggcaccagcagcagatcaaattcccgggctttctggcagaaggcgttggcgtcctcttccagtgccttggggaagatatagaaggtgccgcccgggcgctccacttcaaagcccagcgcggtgagcttctggtacagcagctccatgttggtctggtagaccgaaaggtcgctggtcaccttctggcagcggctgaccgcccgctggatgatgctgggcgggcagttgtggccggtaaagcgggagatctggctcatcatgtccacaaggatgtcctcgccctcgcaccccgggcgcaccgccacatagcccagacgctcgccgggcaggctcaggctcttggagtaggagaagcaggtcagggtgtgggggtagaacgccgccgggtaaggcacggtcttgccgtcaaacacgatgtcccggtagggctcgtcactgaccaagaagatattgtgtccgtactgggcgctcttttcggtcagaatcgccgccatgcgggtcagggtgtcggcagagtagaccacgccggtggggttgttgggggtgttgatgagcacgcaggtgaccttttcggtcagcatctgtgcaaaggcatccagattgggctgaaaggtgggcgcctgcggcggcactacccgcagcaccgcgccggtgcccgccacataggggccgtactccgggaagtaaggcgcaaaggtcagcacctcgtccccgggctgggtcaccgcccggatggcgtgggcgatagcacccgccgcgccggtggtggggaagatgtgtttttgcgcgtagggcaggccgaaggtctcggtcagatgcgccgccactgcggtgcggaagcccgggtcgccctgactggggcaatagccgtgcaggcttaccggctcttcctgtgccagcagggtctgcatggcttcggtgaactccggcgggcagggcacgctggggttgcccagtgaataatcgaacacgttctcactgccgatctgggcagcgcgctgtctgccatacatgaaggtctcgcggatgacgcttttgttgttcagcatggcgcggtaggtctcgttcaacatactactttccctctgcttttcttatatcgcaaagcctgtgcggggcggctccccctcatttatgcgccgcagccgtatagctttgttccagcttgatgatgcagttataggtgggatcctgctctttgatgaactgctccatctgggtcagcagttccaccttgtccccggcatagcccgcggggagcaccagatcgaaaagcacattggtgtgggtcttgcccggcacaatgcgcaggtcgtgcagtgaaagcgccgggtccagctggcgcagcttttcggtcaggcggctgcgcagcacccccacggcggcgtccgaggtgacgatggggtcatagtgaatggtcaccatcagatggtcgtgcttcataaagtcccgctcgatgttgtcgatcaggtcgtgcgcctccagcgggtcctgctcggcgggcagctccacatggatggacgcaaactggtggccggggccgtagtcgtgcaccatcaggtcatgtacgcccagcacgccgggataacccatcacggtctgttcgatatgctccacaagatcctcgctgggactttcacccagcagcgggctcagggtatccatcaccagaccccagccggagatcaggatgaacaccgccacacccacgcccatcagaccgtccagcacatcccagccagtcacccggcagaggatggcagccaccagcacggcagcggtgctcagcacgtcgttgcggctgtcggcggcggtggcgatgagggtctcggaggaaatgatacggccaatggcgcggttgaagccgctcatccacagcttgaccagaatggacaccaccagcaccgccacggtcagccagccgaactgcaccggggtggggtgcagcaccttggtgaccgattccttcagcagggagaagccgatgcccagaatggtcacgctgaccaccagcccggcaagatactcaaagcgggcatgaccgtagggatgctcggcatccggtgccttagcggcaagcttgaagcccaccagactgacgatattggaggaggcatccgaaaggttattcagtgcatcggcagtgatggcgatagagccgaacagagtgcctaccacaaacttgcccagacagagcaggatattgcacaccatgcccaccacactggccagattgccataggcggcgcggacgcgggggtcctgcggagaattgggacggcgtataaacagacgaatcaaaagctgcgtcataaaagctcctttcgggctgcgcattttcagcgcacccaatgtccttctagtatagcattttactttatggttttaaaggcgtttcagaaatttcatcccattacgccggatatcaaaccgggttgtagcacaaaaagcctcggcgaccgcatggccgccggggcttttcggagatttcgggactgtctgttcacagtctcttgtaattaaggaggagtgctcgggtttttatcacaggatcgggctttcaaggtcgccggtatcggcgatgccgtgcttctcggcgtagccggtcagcatcagggtcagagcgccgtcaccagtcacgttgcaggcggtgccgaagctgtcctgcagggcgaagatagccagcatcagagcggtaccggcgttgtcgaacatcaggacaccggtgatcagacccagagaagccatgacagtgccgccgggcacgccgggtgcgccgatagcgaagatgccgagcagcaggcagaacaggatcatggtgccaacgctgggcagcttgccgtacagaatcttggaaacggtcatgcagaagaacacctcagtcagcacagagccgcacaggtggatgtttgcaaacagggggatgccgaagctgaccatgtccttacgcaggaccttgctcttgcgggcgcactccagcgccacacccagcgtagctgcactggacatggtaccgacagcggtcaggtaagcggggccgtagtgacgcagcacttcccagggattcttgccggagtaagcaccggccagcaggtacagcacagccagccagatgtagtgaccgaccataacgatgacgatgatctgcagaaaggcgggcagctgatgggtgatggtgccctcgtagctcaggccgcagaaggtggcggcaatgtagaagggcagaacggggatgatgaccttgctcacaatgtccagcacgatgttctggaactcggccaaaaagtcgcaggtcagcttgctgttggtccaggtagcagccagacccaccagaacgctcagcaccagagcgctcatgacgctcatgatctggggaatgttcagctcaaagacgacgcccggcagctcgcgcagaccggcaacgttgttgtcgatggacaggtgggggatcaggccgtagccggcgcccatgctcatgaaggctgcgcagacagaggacacataggcgatgatgatggccactgccagcagacgggaggcgtttttgcccagctttgtaatggacggggcaatgaagccgatgatgatcagcggcacacagaaggtgatgagctgacccatgatgtactgcagggtcaccacaacgcccatggtgctctcgttgaacagctggccaaggatgataccaacaaaaatgcccagcaaaagccggaagggcagactattgaatagctttttcataactttagtacctctttctttttccccggaaaggggctgggtggggagacttattccgtctccgggaggtgtttgttcagcatcagatcaaggatcacgctgtcgctggtgccgtgggtgctcagggtggcaaagttgtccagcgtatattccacattgtgctccacgatgccgtcggtgctctgcacccgcacgccgcgcacgcccatggcagctgcctgacaggcggcgttgacgcaggtggagatcttcagtgcgcagtcggcctttgcgccgtcgcataccatgccggtgacgttgcctaccatgttctggatggtgcagcatacctcgtggtagccgccgcccagcagataggcaatgccgcaggctgcgccggtggcagcaaccgttgcaccacaaaggttgctcaggcggccaaacttggccttgatgcggatcgcgatcaggttggaaagggtcacggcgcggagcatcttctcctcgtcgatgtccagccagcgggcagttgccacaacaggcatggtagccgtaatgccctgattgccgctgccggagtttgccaccaccgagaccggcgcgcctgccatgcgggcatccgcaccggcagaagcaatgaccatggcgttggtggtcaggtcgcgggtcatcagccccttgcggcagttcagttccagattgcggccaatggcaaggccgtattccttggaaagaccctcgttgctgatggtcgtgttcacctgtacggcgctgcggatgatgtcgatggggtcgtgcagggggtccagctcttcagtgcagtaatcccagatggagcggacggtcagaaattctgcgatctgctccggggtcaccacatcgctatcccctgctgcggcggggtcggtgtgctgcttgtccagcgtagccacgccatcctgctccaccagcaccacgttggtgtgcaaatcgcgcaccaccgcgcgtccggtgtggccgtcagaagttacaagcacttcaacatagagcttctgcggcacctgtgccacctctaccttgaccttgcctgccttgacaagggctgcggcttcttccatctgctcccggggcacatagttcatgacctccagcaggtggacggggtcaccgcctacggcaccaatggcggcggcgtaatccatgccctgatacgaggtgcccggaatgcctgccgacatggcgtttttgataatgttgatgctggcgcggacggtcacggcttctacccgtgtgccgcccgccttgcggagtgctacgcccgcctctgcggcggtgagagcgactgcgccgggctccgtacagcccgtggccagctccatctcactgttcaggatgcgaacgaacatctgtttatccatttggttcaccgtttcttttcttcccgtgcgggggaacttactttacagcaatgcactcgatctccagcggagcgtccttgggcagcttgcccacctgcaccgcgctgcgcgcggggtagggctgcgcaaagtactcgccgtacaccttgttcatctctgcaaaatcgttgatgtccgccagaaacaccgtggtcttgaccacattggccagcgtcatctcctgctgtgccagaatggcctggatgttcttgagggactgtgcagtctgggcggcgatgccttccgggatcaggccggtggccggatcgatgggcagctgcccggatacatagacggtctgccccgcagcgatgccctgcgaataggggccgatggcagcgggagcattgggggtaatgattacctgtttcatccgattttctccttttccatttgttagggtgtatctgaaaacaaagaaaatgacgaatatttcgcaagcacaagcgggatttaaggcaaacagccgcaggaatcctttgtggatttcaaggctgtttaacgcaaaatccagctgtgtttgtagaaataggctaaattttcgacttttcaggtaccccttaggaagggctgtccttcccttgctgacactatcctaacgcagtgagaatattttgtcaataatgttttattatcatgagaataaattgtcgcgcatgacaaaaactccagaaaaatgtcatcattttgacgaaacaatggatacaacgcaccttcttattgtaaaaaactgtcatttctgctatgatagcaatagaacacgcatgagaattttttctcacgcgctccagcagtacaaaagaggtgaacgggatggatgcaagacttgagccttatcgcgtagtggtatcttttctgggggaggcgctgggtccggactacgaggtagttctgcacgaccttaccagtgaggacggcaccattgttgccatcgtcaataaccacatcagcggacgcaccgagggtgcgcccctttccaacatggcgctgcgcttcattcaggagcggatgtatgaaaaacaggattatctggcgggctatcagggcgcttcgcaggccaaggggcggctgcgctcctccaccatgttcatcaaggacaacggtcagctcatcgggatgctctgcatcaactttgacgccggcaagtacagccgcatcgcgcaggagctgcttgccctttgcggggcacacaccgagccttcctccaccggcatcggggtggagaactttgtcagttccctgccggacgccgtacagaacgccattgccgaggtgaccggcagcgccgggctgccgtccgaccggctgaccatggaggaaaagatccgcatcgtggagtccttgcaccacgcgggcatcttttatatgaagggtgccgtcagcgaggtcgccgcccagctgggctcctcggaggctaccatctaccgctacctgagcaagctgaagtaagctgcgaacgaactgctccatgaaaaagaaatcgcccacttgagcgaagaggggcagtatctttgtgccaacgaggggattccacagtacgaagaactgcttgccacggctatgaaaaccttttgaattgcaaaatgatttttcggttgctatactgggcttatcaaatttttttcgggaggatgccgcagtgactgcacagacaatgcaaatcgggaacaaaccttgccgcatttacggcgagcctcatgcagaatacctgctgctccaaatgaccggtgaacatgagctgcaaagcatggacagcgaggttgccgctattgcacagagtgcgcaccactttctgtttgcggccattccggtggaaagctggaacgatgcactttctccgtggaagtctcctgccgtgtgggggaagcaaggctttggaggcaatgctgcggaaaccctgtgctttctgacagaacaggtcgttcccacactgaagcaacagtttcctctcccggaaaacgtcaaaatcattctgggtggctactcactggccggactgtttgctttgtgggcgtccacccagactgatctgttctacggtatcgctgccgcctcgccctctgtgtggtttccggactggatggagtttgaacagcagcacccgatacaggcacagcgcgtttatctaagccttggcgacaaggaggaacacacgaaaaacaccgtcatggctgcggtgggcgataacatccgtgccctgcacagccggcttgcagagtgtggcgcagactgcacccttgaatggaacagcggcgggcatttcaaagacgctgacctgcgcacggcgaaagcctttcggtgggtgatggaggaaagtcgatgaatattttgatcgatgccgacggctgcccagtcgttaatctgacgttgcagattgcaaagcggtttggcgttccggtcatcatcctgtgcgacacagcccaccaaatcgagcgagaaggtgcgcagacgctggtgttcgacaaaggagcggacagcgtggattttgctctcgtcaaccgggtaaaaccgggagatgcggttgtgacgcaggactacgggctggcgagtatgtgtcttgccaagtgcgcacgagtgctgaaccagaatggtctggagtacaccgccgacaatatggacgctctcatgttgcggcgttatgaaaacaaaaagctcctccgtgccggaaagcaccccaaggggagcccaaagcggacgaaggagcaggatgtcaggtttgcggatacgcttgagaagattctgagcataaattattgatacatattttttgaaggatggagaaatccggttggatatgcaaaaaaacaccagcctgagccggtgctttttgttggcggagatggtgggattcgaacccacgtgcccggttaaggacaaaacgatttcgagtttttcctgcttcatggtacttggtggaagatagagggaattagcccactttgccagaagatacgaaccatcgaatgtacgctcaaaattccatcaagatcccaaatcactaggctctgtgcggatttgaacccactttccaaaacgcagaaaaatctgccttttggagagaattgggagagattttacgcccgttggagagaacgggcgagagagattccgggagccaaaatccatccgcacaatatgttgcttctgacgctgaccaaatcaaagcagcaaaggatggatgaacatgagaacgctgttagagtgctataaaattctcgaagaataccccaacggaatgacgaaagaccagttctaccgtgttgcccgcatcaacaagcaacacgcaaagtaccttctggattccggtctcgttccgtgtatcaatacaggaaagaaaacacgcaaataccatattgcgacccacgatgtgatcgcctacttgtgtgaccgtgaagatcatcccgaaaagtataaagtgccaacgggcttttatatcggaaagaacggctgctccaagcggcacccggacaagcctgccgcagagattatacgcttccattttacagagccggaaaaaacagggctgtacaccctatggaaaaagttcacggttggatatgatgatttgctgaccaccccggaagtttcggaactgacgggctactctgcacaaagcattcagcgatggtgcaatcagaagatccttgtaggattcaaaattcgtggcacattgacgattcctcggctggcagtcgttgagtttatgtccggcgaccgtgcaacgggaattgtccgaaaatcctcaaagcaccttgacctgctccgcacttatgcacaggactgccacgagggtgcaatgaccattacatactaaacagacaggactgctccacaacgaaatgtatgtgaggcagtcctttttgcttagatgcaaagattattctttaggtagttattcttggtagaataattactcgaaatagaaggagggtagttttccacatgaaggagcactcacagttgaaaatccgaggacacaccaaatgacgctggactatttctatggtcagtcgggcgaattgttctcctacttccgcatccccaaggcactgttccacgactgccgcttccggcagctctccaccgatgcccggacgctgtacggcatcctgctggaccgcatgagcctgtcagtcaagaacggctggctggacgagcaggggcgagtgtatatcatctacacagtccgggaagtacaggaatccctctgctgcgccgaacacaaggcggtcaagctgttccgggaattggagcagctcaacctcatcgagcgcaaacgccgtgggctgggcagacccagcctgatctacgtcaaggatttttcctccggcttgcccaaagcgcaagtacagaattgcccaaacagcaattctggtgctgccaaaagcgcaattctggaacagccaaaaccgcaagcaaataagactgataagaataaaacagagtggaacgatcctgaccctatctattccgggggcatccgggagcagcttgaggattatttttatcaggcgttggaggtggaccttctgctccggctctgcccggacgaggaggacaccatttatcaaatcgtagatctgctggtggacacctgcgctaccaaccgcaagatgttgcggatcgcaggagatgacaagcctatcgaggtggtacgcagccggctgaaaaagctgaatgccgaccacatcaaatttgtgctggattcgctggcagaaaacaccgccccggtgcggaacatgaagcaatatctgctggcgatgctctacaatgcgcccaccaccatgcagctttcctaccagaaccaaaccaaccacgacttagcgaatcggaggtgatgaaaatttcaaagaaagcaaccacgatagtcatcgtcaatcagaaaggcggcaccggcaagaccaccacctgtgaaaatcttggtatcggtctggcaatggagggcaaaaaagtcctgttggtggacgctgacccgcagggcagcctgaccatcagcatgggctggcagcagcccgatgaattgcccaccaccctttccaccctgatggcaaaaaccatgaatgaccagcctatccaacccggcgagggcgttctgcaccatgcagagggcgttgacctgattcctgccaatatcgaactggcaggactggaggtggctctcgtcaactgcatgaaccgggaaaagatgctcaaacaagtgctggaaggtgcgaagtacgactacgatttcattctgttggactgcaccccttcccttgggatgctgaccgtaaatgcgctggcggcggcagacgctgccctgattcccgtacaggcgcagtacctgtccgcaaaaggcttggaacagcttttgcagactgtccaaaaagtccggcggcagatcaacccgaagctgaaaatcgagggtatcctgctgaccatgacagacagccgcaccaactatggacagcagatcgacaacctgattcggggtgcctacggcagcaagatcaaggtgtttgaccagaccattccccggtctgtccgtgctgcggagatcagtgctgtgggcaagagcattttccagcatgaccccaaaggcaaggtggcagaagcctataaatctctgaccgaggaggtgatggcgaatgccgaaaggcagcttaaacgtgtcgctgaaaggggcagatgacattttctccacagaagaatcccggcaggaacagcagcgggaacaggtgcagcagattcccatcggggaactgcaccccttcaccaaccaccccttcaaggtgctggacgatgaagccatgacccggacggtggaaagtattgcacagtacggggtactggctcccctgattgctcgccctcgcccggagggtggctacgagatcatctccgggcaccgccgtcagtatgcggctaaacttgccggactggacaccctgcctgtcatcgttcgcaatatggatgatgatgccgcagttctgctcatggtggatagcaatctccaacgtgagaacatcttgcctagtgaaagggctttcgcctataaaatgaagctggaagctctaaaaaatcaaggtgctaggtcagatttaacttcggtgcaagttgcaccgaagttaagcaccgaaaaaattggcgaagaagtgggcatgagtaaagataatgtcaaacgctatatccgcctgaccaaccttgtcccggaactactggacatggtagacgaaaagaaaatcgcttttaatcccgctgtggagctgtcctatctggacgaagcccaacagcgggattttttagaagcgatgaacgacacccagaatgcgccgtccctttcccaagcgcatcggcttaaaaagctggcgcaggaagggcacttctcgtatgatgttgcctttgccgtcatgggcgaagaaaaaaaggacgagctggacaaggtagtcatcaaaaacgacaccttgcggaaatactttccccgcagctacaccccgaaacagatggaggacaccatcatcaagctgctggaacagtggcagcgcaaacaacagcggcagaatgaacgctgacttataccgtaacgaaagacccgatggggtctttttcttttgtaaacaaaaggagaaaagcctatgaaaaacaacgctacccgtaccatccgctccgaggagatcaccattgatgtgcgtatttgcgctgcactggcggcaaaccggagcggcgaggtctacctcgcagctatcgccccggacatggagttgaccgtcatcacgctggacgaagctccgggcatcctgccctgctttgaggaggacgacgcctgcctgaacctctccaacacctcgctgctgctctgctacaacccggcgcaggtgctgaagatgggcggcaaacactacctgaccggcccggtgattctggctcacaccaacatggatggcgaggtcatctcgctgaccattgatgaggtctacctgttccagaagtatctggaaagccacagcatcaccctgatggcagacgaccagaagctgccctgcatctgcatcgactgaggtgttccatgctgaacttttttatcggtttcgcattttttgaagcaggtgccattttcggcttcttcgtggcggctctgctgaatgccgcccatgccgggcaggaggaaacccatgaagaaatttgatgtggagatcacggagactcttcagcgcaccgtgaccgtagaagccgcttcgcaggaggaagcagagcgtatggttgaccgtggatggcgcgacggagattacgtccttaccgatgaggattatgtgggggtcgatttcaaaacgaccggtgagcacgaactttcggaaaagaagatgctggacgttcttcttgtaaagcccaatgagcatccccagaacgtcagcatcggcgcagaactcaaagatttgcaggaggcagtgggcggctcgattgatgccgtttacccctttgcggacccggtggctatcatctgccatgacgagggcaagctcatggggctgccgttgaaccgtgccctgcgggacgaggacgggcagatgtacgatgccgttgccgggacctttctggtggtggggctgggcgaggaagatttcgcatccctgaccccggaactggcgcagaagtacgagcagttttttcatcagccggaggcctttctgaaattgggcaaccgtctgctggtgctgccggtgcccgacgaacctccgggagaaaagccccgcaccaagcccccggcagagcatgaccgctaaaagcaccctgctgcacgggagactaactattaaaagtcaagccccaaaatgaaaaaatccgtctgccgaccgctgcccctgacaaacagcattcaaattgtggaataaggaggtggcaagctatgacatggccttttgaaaatgataccagtgacattgaaaagaagctggcaaagaaaagtttgcaaagcgagaagcgccggaatctgatggtggtgattgccgttgcgctggcggcatttctgatctgctttacgggaattgtgtctacctccctgacacaaatgcagcgcaatcaggttgtcgatacttatgaggcggtctggctgggcgtagaggaaaacgacattgaaaccctgaaaggactgccggagtttgagcgcgtaggcggctactatatgctgggtgaggagctttcagaacagggctatcatgcgtcctatgtgtattgcgacgcgcaaatgatggagattgccaaggcgcagatggagttgttagagggccgggttcctgaaaaagcaaatgaagttgttgtaagcgaatactttctttccacctatggaaacaatgccaagatcggggacactgtgaccttagatacagagagttttcatggtgattatgtcgttaccggcattacggacagcgtaaatgaaaaagaagcgaatacctgcgctatcattctttccaacgctgccctgacagaatggaacgggtttgacccggctggctatcgcgcctatgtccatttcaaaaacagcgaccagttgggcgaagaactgatgacctcttattgcagggagattgcggaggaatatcagcttcctatgcccaaaatgaacagtaagtattttgcctatgcttctaaatcctttgattttgcactgatggcaggtgtgattgcccttgttctgattggcggctatattgtgatccagagtatcttccgtatctccatcaatgacaaaatccaaagctacgggcagcttcggacgattggtgcgacaccaaagcaaatcaagcggattgtaaagaacgagggacgcaaactcggcagtatcgggattctgattggcacagtgctgggcgtatgcggcggtttcctcctgttttccaagggttttaacgctgtttcctatgtggcaacggttattttaacgcttataagcagttggatcatgatatctgtttccatccgtaagccggtgaaaattgcggcagggatttcccccattgaagccgtccgttttaccccggcgcaaaaggacatccgcagtcggaaaaagaatatcaagctcaatcctgtttcaatgggaattgcaaattttaggcgtgaccgaaaaaagaccgttgctattgtagcctcattgagtttgggcggaattatcctgcttgtggtatcctccattgttttgctgcgctcaccagaggcgcttgcaagacagtttttcccagacggcgactataaaatttatttggattctgaaatgacagaagaaaaggttatggcagcgggaaatccattgaatgaggaattaaagcagaaaatcttatctattgatggcgttacagatataattccaagcaggcaatctctccatgcaacttataaaacagagattcatcaagctggtggtatgtgcgatatgctgaccgaccagaattatgcggcagttgaagcggctctgacagagggaaccatgccaacagattcccgtagtattgtaattgactataatgtgctaaagcagaatgaggatatgggtgttggttcaacggttgagatttctttgggagaagaacagccatccgtttctgttaccatatcggggttatacgctcctgcaaaggtatattcaggacatggcaggatgcacttagatggggcaactctttttgcaccagaagcgttgttccacgaactgcacccggaaatcacctcttttgactattcatggagcattgtaaatgacgctaaaaaaacggactatgtgggagctgaattgaaaaatattgttgccagccatagtaatattgccttagatgaaatcaatacagtgattgaatatgaagaaatgacaaattcttttgcgtttggcagtatggagatactttcatggttggtatttctctttggcgttatcaaccttatcaatacgacactctctaaccagatagcccgaaagcaggaaaacagtattctgcgttctatcggcctaacacaaaaacagctatgtaaaatgaacatctgtgaggggctgtgctatgcgctctttgcaacattggcgacgctgatcgttgggcttccggcttccatctttgcttgcagaaaaatgagtataggagcttttgccggaaatgtagtgccttacaaattcccggttttggaaatgggactgttcattctggtattgttcggaatggaactgatcttgtctgtatggacaatccgcagacagaaaaagcaatccctgattgaacaaatgcgggcgatggaataaccgtatgggatcggcggggcggcgtgtgctgccccgcttttttcgccatttctcaaaaaatttttgaaatgtccgagctttgtaacaattcagcctgtttttctgtcgaaatcaaaggcacctcggacatttgtgtaacatttggattttataataatcctcataaagagaaatagcctgttagcaagctgccgcacgacggcaaaagaaaaaaagccgtcgtatagcagacatatccgcgcgcccattttgaaccggcggcttttgagtaactcaaggccgccggttctttttgcttatcaaagcgtttcatcatccgtatggcggccactaggaggatgccgtcatgtacttgatattctatcagccgcccagttttgaactgtcaaaaaaagccttgctcccgcacagggtcagcagggcttttactatgtactatacgatgtagctactgcgcgtttcgtgctttcattatgcccggttggccgttttcggtctgctgggcttttctattgccgcctgaaaagctgcctgtttcaaaaatatttttggaaattttcaaaaaagcgggcagaatcgggtgtttcaggtgtcatattagcggaaagggaaaaatccacccgacatccccacggaaagggggtgagaagatggaagctatccctcgcaacgatggcgaacagtaccgattcgatgcgttctgcaaagcggtgctgcgaaatgaggcccggaactatcaccgaaataagaaacgtctgcttgaccgtgaaaagtcattcagcgttctttcgttggaagaactggggcagctcacgagtgtagaccattatccgagcgaagaatttatattttcgtcctacggctgtgatctgcacctcgacaatgagcttgttgccaatgcgtttgccgccctgccaaagcaagaacaaagcattctgattctgttttgcgttctggaactgggcgatggcgagattggcgacctcatggaaatgtcccggagtgctgtacagcgccaccggacaaaaacgctgaacgagctgcgaaaaaagctaaaggcgcacttgccggagggaggttaggcgtaaatgaactcctatgaacacacgagcagagattttttgccgctctcggtgattcgctctgcctgcgctggggacaccgatgcagttgaacaggttttgcagcattacagaggttacatcaacaagctctgtacaggcattctctacgataagcacggccagccccatgtgtgcatagacgagtacatgaaacgccatctggaaatcaaactgatttcttctattgtaaccaaagccgaaacggtctgaccctttccacgtttcgggacagcaccttgaaaaatatgcccgcaggataatggtggtgcatcatagggcaaacggatacgttgctgtctgtatcgagccggacggcgggtgcgccatgatgcttttctctgaaaagtggagcgatcatcaccatgccgcaatgcaagcgcggctgcttgtgggccatgacatacaggcaggctgatactcccttaccgtcaaagtccgagcgttcagagcgtcgcaggcaatgagtagggctgcatgaggaatgcaggggtgagattcccgtgggttgctgccagcagccgtccgttggctcattttttattttgtgaaagggggatatttttgaaagaacaaaatttgatacgttatagcattcagcttgcttttttgaagcagctgttagacagaaagctcataaccgatagagagtattcccttatcaagcagcgcttaatgaaagattatcgtgtggtttccgaactatcctcttgattttgtgttgtattggcgttatgattaacgcaatgaaaggaacacattcaacaaggaggtcaagcatgaaagatgttgaagtcattaaagcgcgaaacacgctctctccacgagtgcgcacaaactttgaaaaaaggctgcgcgtagccgcctattgtcgtgtcagcaccgataccgaagatcagctgaacagctacaagtcgcaggtcgaatactataccgaacttataaaaagtaagccggaatggtctttggcaggcatctatgctgatgaagctatcacaggtacgcaggtgaaaaagcgcgaggatttccagcggttaatcaacgactgtatgaacggtgacgtggacatggtgattaccaaatccatttcgcggtttgcacgaaacacgcttgacactctgaaatatgttcggatgctcaaagataaaggtgtggctgtgttttttgaagaagaaaacatcaacacccttactatggacggcgaactgctccttgtgattttaagttctgttgcacagcaggaagtcgaaaatatttctgcgaatgtcaaaaagggcttgaagatgaaaatgcagcgcggtgagctggtcggttttcagggctgtttaggctatgactacaatccagaggacaaaaccctcaccgtcaacgaagaagaagcggctgttgtccgttacatttttcagcgatacacggagggtgccggtggttcggttattgccaaagaacttgaaaacttaggttataaaaccaaacgcggcagtcccaaatgggcggacagtaccgtaatcggcattatcaaaaacgaaaaatacaaaggcgacattttgttaggaaagacattcaccgttgaccctatttcaaaacggcgtctgtacaacttcggcgaggaagatcaattttatattcgtgagcaccacgagcccattatttcggaagaagtctttgaagccgcccaagaaattttgcggcggcgtgcaaagccccgcagccttaatgtagacggcaaacgtgaaaagttcagccggaaatacgcttttagttgcatgatagaatgtggtttctgtggtggcaccctgacaaggaggagttggcatagcagttcacaatataataaagcaatctggcaatgtgtcgtttccaccaaaaaaggaaaaaagttctgcccggagagcaagggtgttgacgaaagaacgattgaacgggcttttgtagaatcctatcgcctcttgtgccagaacaacaaggatgttctggacgagtttatgaaacggacggaagaagccctttccgaaagcaacgcgggcaagcgtcttgcaaaagctgaaaaggacattcacgctctggaagtcaagaaaaacaagctggttgatatgcgtcttgaagataccattgacaaggagacctacgaccgaaagtatttagacctgtccagccagattgagcagttgcagaaagagtgtgaaagcctgcaagatgcagccgaaaccgaatctacaatgcgcaagcgtgttgccacgttccggcaaacccttgaacagaacgaggttctggacacctttgaccgacatatttttgaaagtatagttgaaaaagtaatcgtgggcggttatgatagtaatgggaacaaagacccctacatgattgtctttgtttacaagaccgggttcaaaaacagtgtggacggcaagaatttcaagccgcttcgcaagaatagcaaggagaaccactcccctgctgttttgtgttcccatgcttctaacgaggctgaatccatgtgttccgattctagcgacgacacatatcgagacggtatgtgcattgtccaaactggatgtccaccgcaaaaagccatctgggaggcgctgaagcatttttagcgtgtcctctctgccgaggacttttatgcagagaaaagaacgttttgcaattttccctgcaaatggactgcgaaggtaaatccgcagctcccggttgagaaaagctttgtggagtgatacaatactattgtatgtgccctgtccggggcatcagttcacagaacggtataacttgcaatggatagatatttttttattttaacgaccattgatctttttgtgctcggctttatgtgtcttcttacaaggctgagcgaatctttaaataaaaagcagaagcgcgggttccttctggcctttgcgctcattgcgtgcatctcggtgctggaggtcatcaccatcgtggtggacggcgcaccgccgggctaccgctggctgaatattttgtccaactatcttggctttggactgacaccggcggtgccgctgtgtctggtatatgtgctggataaaaaatccatcatccggcgtgtattcaaggcggcggtgtgctgcgagggtgcgtatctgctttttctggcggcaacgctgccctatgggctggtgttctcggtgagcagggaaaacctctacgcccggggtgcgtacttctatatttatgtggccatgtactatgccgccatgctgtaccttatggtggctacggtgcgcacggcggcggcctttcagaaccgcagccgcatgctgatctatccgttgaccctgtttctgggcgcggagaccgtgatccagctcgcgctgccggagctgcacgttacatggctgtgcgtcacgttgctgtcggtgctgtactatatttattgcagcgaaatgtggaaccagctggacgcgctgaccgggcttttgaaccagaacagctacctgaaccgcaccgctgagatgcgccgcagcggcggggtgctggtggtgtttgatgtggatgatttcaagcagatcaacgaccgctacggccatttacagggagatgtctgccttgccgagatcgcagactgcatcaaaaaagcctatgcccgctgcggctactgctaccgcatcggcggcgatgaattctgtgtgctgctgaaggacgaggaaagcgaagcccgctgcgcaaaaacgctgcaagctttgctggcagagcggcgcaaggtgtttgccattttgccgacggtctcccttggctctgccgccttttccggggaggacgtggttgcagtgaaggcccgcgccgaccgcgcgctctactgcgccaaaaaggaacagaaggcccgcgccgcagcggaaaagcccgcagatggcatcgaggagaaggattgaacggatcatacaggggggaaaccccacccgtacaataaaaaaacggaggaacaccgatgaacacagattggaacagcccgcagggcgattttgataccgctgaaaagcagggggagctgctgatgctgctcagccggcagcaagtcaccgtgcatacatgggacgacccggactttgactatatggaggagcaggatctggcgctggtggtgcaaagcccctctggcacagaggatctgctgattgaactgtgcggggagttctcggtgttttttgaaaagtggcacggcgagtacgtcgccaccgccgagggctacgcgcagctgcagcaggatatcaccgccattctggacggcaaggcgggcgcactgagcctgtacacggaaaacggctggcagggcacggtgctgtgcaccgagctgcccggcgcagaggatgccggagccgctgcggcgctcaagcgctgctggcaggcggcaaagccggacgccgccctgcctgcgggcagtcggctggagctggtgtgctgggatccggcacagaaccggaaagtgcagctcccgtcggaataatagagcaaaaaaggtcgctgcacgcatttgtgcagcgaccttttcttatacgatctgttgtttcttcttgcgattcgccatatagtttgcaaatgcggaggccgcagcgcccagtgcgatgcccagcactgcgccgccgaggacatcggtggggaagtgcacatagaggtacagccgggtaaaggcgataaaggctgccagcaccagcgcgggcgcgcccagctttcggttttgcagccaaagcgcgtaggcagctgccaccccggaagcggtgtgcccggaggggaaggaatgcccatgcggacgcgccaccagcatggtgatggaggtgttgagatcgcaggggcgggggcgggcgaacagcggcttgaggaagaagtgccccgccgccatgtacagcaccagcgccactgccatggcaaagcccgctttgcgggtgcgccggaagagcagaagcagcagggtgaacgcgatccagatctcgccgtgagcaccggcgtaatcaaaaaagatggagatcgtgttcattaccgggttgcggaactggtatagccagtccagaaaagcaaactcaaagggcatgggttcctccttttgggtggtgaaagagcggactttttatacaatatagcatataaatgttaaaaaatacaaaatgtactgtaaatttgccctcaaggcaggggaaaatcggtttctggctgctccatctgcgccaaggtggggtagctgtcgagcgcaccgtggtgctgcacgctgaaggcacagaagcggttggaaaaggtcagatactcggtcaggcgcttgcgggaaagctttggcagctcggcggtggtcacgccgtcccgctgcagctgccacagaaacgagccgataaaaccgtcccccgcgccggtggtgtccaccgccgttaccttggggctgcgggcatgggcactggcggtgcgggtgtaggcgcgagcacccttgctgccgcaggtgtacagcaccagctgcacatctccggtaaagagcgtgggcagcgcggcttcaatatcttcggtgccggtgaggaagggcagttcctcgtccgaaagcttcaggatatgggtcagggggagaaactgccacacggtctggcgcagctgctcccggtccggccagaggggaaagcggagattggggtcaaagctgaggatggcgcccgcctcccgcgcggcagtgatggcagccaaatgggcgtagcgcatggggctgtccaccagcgagacgctgcaaaaatgcagggcaaaggcctgcgaaaaccagcccgggtcgatctgctccggggcgtacagcaggtctgcggagggcttgcggcagaagctgaaggtgcgctcgccgttttccgctaagctgacgaaggccagcgcggtgctggctttgccggtgaattccagatgggaaagatccacgccgcatccggccagcgcccgggcgatcttgtgaccaaagggatcgtcgcccagctgactcagcagcgcactgcgcccgcccagccgggcaacggcggcgcagacattggccggagcgccgcccacccgggggctgaaggcaggtacttcgtcaaagctgcatcccacccgggaggggatcatatcgatcagcgcttcgccgatggaaaataagatcctgtcggacatagggcttcttcctttctgcatacaggtgtaccgcaaggtgcggcagtgttcagtatacacccgcaggacgctatgcgcaactgcttcttttatacggtaatgggcggattttgcggttgacttgcggcggcagatatgctataatttccagacgtatgcaacaacaggaaaaggaaaaaatgtatggatttgacaaaacagttctttaaatatgtctcgcagaatatttttggtctgctgggcacctcgtgctatattctggccgatacttattttattgcgcaggccgccggtacagacggcgttactctgctcaatctctgcctgcccatttataactttatttttgccattggctccatgatcgcgctgggctcggccacccgctacgccattgccaaggcgcagaacgatgcccgggggcagcggtatttttccaacgccatcctgtgcgccgtgctggcgtccatcccgtggatgctggcgggtgcctttgtgcccggggcgctgctgcggctcatgggcggcgatgcaggcatcgtgacgctgggcattccctacgcccgcatctttttgctgttcgccccgttttttatgtgcaactacatcgtttcggcctttgtccgcaacgatggcgacccctcccttgccatggtggcgaccttgagcggcagcctgttcaacgtggtgttcgactatatcttcatgttccccttggggctgggcttggccggtgcggcgctggcaacggcggtttcacccatcatcagcatcgccatttgcagccgccattttcttaaaaaggaaaacaccctgcaattcgtgcggcagatgccctcggcaaggctgctggcgcagagctgtcagctgggcatctccggctttgtgggcgagctttcctccggcgtgaccaccacggtgttcaactttctgctgctgggtctggcaggcaacgtgggcgtagcagcctacggcgtggtggcaaactttgcgctggtggctacggccatcttcaacggcgtggcacagggcgcacagccgctggtgagccgctgctacggccagaacgaccacgccggggcgcggaaactgctgctgctgggcagcggcaccgtgctggtgttggcggcggtgctgtacgctgcggtgttcggcctgaccgatacccttgtaagctggttcaacagcgaaaactcggtgcagatggcgcagtacgcccacaccgggatgcggatgtactttgtgggctacttctttgcaggcttcaacattatggcggcgggctatctgagcgccgtgaaccgcccggtggaggcctccgttacctctatctgccgcggtatggtggccattgtggcctgctcgctggtgctcagcgcggtgttcgggatgccgggtgtatgggcagccttcccagcctcggaactgctcaccgcgttgctgaccctgtttttgctgcgcagaaaaaaggccgagacggcttaaatatacatctcctgttcccgcatggtctcctcgggcgtaagtccggcctgtgcggcgcgaccggtcagtgcccgccattgtgcaggggactggccggtttcttttttgaatacccggcacaggtagttcgccccggaaaaaccgcacaggctggccaccacgtccagcgtgtactcccggtgcagcagcagccgctgtgcggcctcgatgcgcacggtggtcaggtacttgcccggcggcacgcccacggaggcggtaaaggtgcgcaccagatgacttttggagacccccagccgctcgctgagctcctccacgccgtacagcccggcgtaattggcgcggatgtcctcaatagcggcctgcaccagcgggggcagggctggcgcggcgctgtctgcatctgccagctcgcacagcagggcaaagaccagctggctgcgggcgcggctgtgggtgggcttttcctccgcaagccgtcccatcagctcagcggcggcagggcaggtctcgcctttggcaaggtagggcagctcccgcaagccgttcaaaaactgcgtgctggcctgcccggtcagctggacgcacaacaggtggcagctgtcctccggggtcagggtgagcggggcgcggcttaagatcaggtgccccgccgctgcggactgcggcggcagcaccagcacagagccggcgggcgcagccgacgccccgggcagggaggctgtgcatctgccgctggaaacaaggcagacccacagcccctcgccggtcagggtgcggggcgcggaaagctgcacgtccagcagtgcagccggtgcggcgatggtgttccagtcaaacagcaatatctgacacctctaatcaataaaatgctattttatatcacaaaattatctgctattatagtaccaacgaaacaacacgccgtcaagggcgtgaaacaccaaatatttacggaggataacgattatggcttccattagctgccagcacatctacaagatctatccgggcgcaactgccccgtctgttaccgacttcaacctggagattcaggataaggagttcatcatcttcgtcggcccctctggctgcggcaagtccaccaccctgcgtatgatcgccggtctggaggagatctccaagggcgagatgtacatcggcggccgtctgatcaacgacgttcccccgaaggatcgtgatatcgccatggtgttccagagctacgctctgtacccccacatgaccgtttacaagaacatcgctttcggtctggagctgcgcaagaccccgaaggatgagatcgacaagcgcgtgcacgaggctgctaagatcctggagatcgagcacctgctggaccgcaagcccaaggctctgtccggtggtcagcgtcagcgtgttgctctgggccgtgcaatggttcgtaacccggcagtcttcctgctggacgagcccctgtccaacctggatgctaagctgcgtacctccatgcgcaccgagatcatcaagctgcacaagaagctggctaccaccttcatctacgttacccacgaccagaccgaggctatgaccatgggcgaccgtatcgtggttatgaaggacggtatcatccagcaggtcgataccccgcagaacctgtacgatatgccctgcaatatgttcgttgcaggcttcatcggcagcccccagatgaacttcctggacggcaccctgatcaagaagggcgacctgtacggtattgacctgggcggcgacgtgatccccctgcccaaggaaaagaccgccgacggcaagctggattcctacgttggcaagaagatcaagatgggcatccgtcccgaggatatcgacgacgagcccgagtttatggcaaagcacaccgactgccagctggatgctaaggtcgatgtttccgaaatgatgggcgctgagatctacctgtacctggagtacaagggcaacaagatgaccgctcgtgttgctcccacctccaaggctcgcaacggagacaccgtccgcgttgccttcgatccccataaggtgcacctgttcgacatcgagaccgagcagaccatcctgaactaagacttagcaaagatcatttttgatcctcctatcatacgaaagaccgccgaaggaaaaccttcggcggtttttcgttttggaaaaccctcccgtgaaaatggggttcagaaacgcccacaggcgtttctgaaccccgaaataaaataatttttacgctgaatatgcccaaagcaacgcggcgggcattcccaatcattttgtctgtgcgccctgccgcaccagctcgatgaatacattcatctgcggggtcacccatttatcccggtggtagaacagctgccggtgcatcatgacggtgcagtccggtacgttcagccgcgccagacgcccttcggccagcgcgctgcgcacgatgtactccggcaaaaaggaaagccccatgccctgctccaccatctggcacagcagcgcggcgctgcccagctccagataggggtggatggcaaggccgtgcgccgccatgcactggtccagcgcgtcccggtagctcatgccccgctcggtgagcagaaactcctgccggggcagaatgtccagcgggagcacgctttcctgcgccagcggatgctgcagcggcgcaatgaagcacaccggctccggcacgtccgcagccagcaccagcgcaggctgcaaaaggggctggtccagcgtgtagacaaggtctacctgattggtgctcagcaattgcagcatctcgtccgtggaagcggtgtgcagcaccagctccacctgcgggcagcgggcatgatagcgctgcaacagccccggtaaaaaggtgctgcacacggaatccgccagcgcaatgcgcaagctgccccgcacctgctgggcgggctgcaaggcggcctgtgcctgctgggcggtttccagcagggtgcgggcgtagcctaaaaaggtctgcccagcatcggtcaggcgcaccgttttacccacgcggtcaaacagcggggtgcccagttcggcttccaactgtgcgatttgggaggacaccgccgactgcgagtagcccagctgccgcgcggtgcgggaaaagctgtgcagctcagcgatgtgcaaaaaggtattgacagtccgcagttccatgaacggctccttttataacagggtgatatcctgcacggtgagctgagcaccgtccacggtaaaatgcacctccagcccggcaaattccatgccgtacacccgctgcgggtcgtgctggtaggaggggcgggggtcgctggcaagcacgccctgcaaagcggcgcggtcggcctccggtacggtctgccacagcgtctccaggcaggagacttccagatggtgggtgcgggtctgtccggtaaagccctcggcggcatccgggtggcagtccgcatagggaatgtagggcttgatatcgtagatgggggtgccgtccatcaggtcggcaccgcgcacgatgagcaccggccccacgtccgggcgctgctcaatggcctccagctttacgctggaaagccccagagggttcggccggaagggcgaccgggtggcaaacacgcccacccgggtgttgccgccaaggcgcggcgggcgcacggtaggggaccagttttcccgcaccgcgccggaaaattgccacaccagccagatatggctgaaatcctccagtccgcgcagggcgtcggggttgcggtattccggggtgaaaacgatctcgccccgcagctcttccaccagcccgctctggcgcgggatgccgaacttggtgggaaaggcggtatggatatgggcaatgaccttcagggtcatggcttcgggtgcctgctgcatgatgaactccttgctcaatagatcttttcaatggggcagtcggcggggatgccgtaccggctgcggaaggcctgcaattcctgcgggctgcggatcagctgtacctcggtaaaatggccggtgtgcagatcctgaaatccggccacctgctccccggtgcagatgctgcaccgcagtatcggcttctgggcggcggggtcgtaggagggggacattttctttttgccgaacacgggctgctcctttctctccttatcttataggccgcggcaaagccccacggctttgccctcgatgtgcagctccgaaagctgctctccggcgtagaacatgggcgggcagacggcggcgttatcggccagcagcatcacggcatcgccctgccggtggaagtgcttgagggtggcttcctcgcccacccgcacggcagcgatctcgccctgctccacctcgggctggcagcggatgcatacgatatctccgttgcatatcgtgggagacatactgtcgccgtggcaggtcagggcaaaatccgcgtgccacgcggcgggcaccccgatatagcactcgatgttctgctcggcggtgatgggcgtgccgcaggcgatggagccgatcagcggcacctgcaccatggtgggcagcggctcaaagcccgggggacaggcgcagggcgcgtccagccccagcagagcggcgggagtggtctccagcgcctgcgccagctcctccactttggactggggcagatcgttgatgcctttttccagcttggtgatggaggaacgggagcggtagcccatgcgccgggcaagctcctcctgcgaaagacccagctgctcccggcgcagacggacacgggtggacagatcagacatgacagttctcctgaaaactatgtgttgtggtgtacgatacagtgttctgccttgagtatagcagaaaatttcctgaaaatcaacaattacagcgcgttttggaaataatatgttgacagataatcaacaatggagtataatacaaccaatgattgtttcgaatgcagcgaactacaaaaaaggagcgaagccatggcaaacacgaatctgatctacacctacattcaggacagcggctacaagctgcaatatgtggccagtgtgctgcacatcagcagcaacaccctgcggcacaagctgctgggcgagacccagttcaagctggacgaggccgagcggctttccaccatgctgggcctgacgatggccgagcgggacgcctgctttttcgatgccgagaaccggttctcgcgcagtgcaacgctggagctgcccaaaagggggaagcgccagtgacaccggagcagcgcgatgtgacccggaacgccctgcgcaagtatggcgagcggcactgggcgcgcacgccggaaaaccgccgctggcaaagcgccattgatgagggcctcgactactatcaggcacacgaccccatgcgggcagacctgctgcggatgcgcttttttgagcagcgcccggaggacgagatcttagagcagctgcacatcggccgcaccacctaccagaaggcgttgcaggaccttttgagcaccatcgctgtctacgccgcccagcgcggcgcgttctgagcaaacagccgtgaaaagcaactataaaacagggctgctgcaccgtgtttcgtgcagcagccctgttttggttatttcttcttagtgttcgggtcctcgcaatggctgtggcaggaggcacagttgccgttgcagccctcacccttccagccgccctgtctggagatccagaccacagccagcgcaaacagcacagccaatattaccagcgtgatgatcccgcgaagtgtcatattcatccctcgatttcttttgtacggctttctgccccaagtatacacgatttgcaggcaaagagcaacagcctgccgcacattttttgtgcagggtgcagccgatgcggctgcccggcggtaatgttgcacgcccggcggtcggcgcaccatttttgcagccggagaaagtgtttcgagaaaagtaaaataattttaaattagggcttgcatttctgcaaaggccgtgctataataatcacgttccagttcggagcgcacaacacaagcgaatatggaggattagctcagctggttagagcacctgcatcacacgcagggggtctggggttcgagtccctaattctccaccatacagttcgtactcgaacccgattctttacgaaaaagggttcgggtacgttttttgtttacaggaggttctgcgaaaggactactcggaacagtaaacgagcaaaggcagggtatcaccatgacggtggtatcctgcctttttctttgaaatcaagttatcattgtgcgaacttgattgcccttatggagaaaatcattttactggtctgcgctttcgtacatctgggtcgttgtgccgacctgctccgtaccagcgttctcgtcaatggtcacatcggcagtgcagctttcaatggtgctgccctcggcgcggcctgcaacggtaccgggtgtaacggcaccgtcaatgctgccctttaccgagcagttggtgattttgaaaaccgtctcctcaccgtagtagtacagaccggtacccacaaggccgcccacatgggtggcaccgtttgccttgatgttcacggtcacattgcagttgtcaatgacagagggatagtttttagtggagaagccttccgtctcaaggcagatatccgggttggaatgagtacccgcatagccgcataaaccgccaatggcgtgaccgccgttttcgctctcgatggtcacatcagcggtgcagttggtgatggtgtccatcatttccagacagccaccgatgccgcccagaccaaccggctcattgccggtggcttttacggtgccggatgcggtgcagctgtcgatgctaccgccaaagctgccgccgactaccagaccgccgcactcggcaacgtctgcctggatgatctgatcggtaaagtgattgtcaccgatgacgaccacggtagcgcccttcaccgtgcagttggtgatggagttgttgttgccgcccacgatgccgccgacacagttgttgccggtaatggtggaatcacctttcagtgtgacgttgtatacagagcccatgttgtagcccacaacaccgccaatggccatggaagtgccttccgttactgcgaccgtggcattttccagtgtcagatttttcacctcaccgcagcttacgccgaacagaccggcaccgcagttgtaaacatccgaagtatagttcaggttggaaatggtatggccgtcgccatcaaaggagccgaggaacagggtggagtgtgtttccatgtcgttcatgttgccgatgggagcccactcgacgccagacaggtccagatcactggtcagcttgaaggaaacaccggcatagccgccctgcgagccatcgttgacgttggaagcaaaggtcagcagggaatctacgctgttgatctggtaggggtcttcctgcgtgccggaaccaccgtcatagttggcggaaacagcagtggtgctgacggaagaagctgccgcagaacttgcggcagtgctgcttgcggtactctgggcggaagaacctgcacagcctgacaggagagcggcggcgaggcatacggcaatcacgccggtttgaattcgtctcataatggaatatcctttctttgttagtttcttctaaccagaaagtataacaaaacaaagacggtctgccactccgaaccgtcaggaaacatccaattcggacggcgagtttcggaacagagtggggcttatgccgtattcctttttgaacgcttccgaaaatttgctagggttatcatagccgagtgtagctgcgatctcggtcacactgcggcttgtatcctgcaaaaggacgcgggcggtctgcatccggtaggttttcatgtattgataaatggagctgccataaacggctttgaagcagagcttcatggaagtctgcgcaatgccgaactgccgggaaagctcagccaatgtgtaatggtgactgagatcttgtatcattgcatcgtgtatcgcccggacagccgtgacctgactgcgggagaaaaaccgccgcttttccgagaaggactcctgcggtaggtcgtttaggagcatgagcagttccagtaccttggctttcaggtagtgtgccatccgttccggtggggcggcatacagctccgagaaaatgtgcgcgacttcccggttgctgcgcagcacatagcagctctcttcccggcagaaacgctcggcgatggcttccaaatggatatcaagatcgcccatgatggcttccagagaagaaagcgtctgctgcgcccgcggcaagtcgatggtgatggaaatgccgtgatagtgcgccagtggaaaacgggtctgccgggtggtgtggctcagccggtgaatggacaggtcgcccgcaccgatatactgataatcgccgttctgaaattcgcactcaaaccgcccttcccggcagtgattgatttcgatggtatccggcatggggcgtttgttctgattctgcccgtccttcatgtgaaagtcattgtagaaaagatcgatccccgacaggatcggatattcagagatgagcccttcgccggtgtcgttttgcatccggtaaagtctgcacccggcagatgcggccaaatgctgcacctccgggtcaaagaaatcaatgggacactgcttcattccagcacctcctcacagccctattataataaatgcatgagtttggaacaagccacacctttatccattgaatctataaattccagcttatagcacgcgttcctagcagggtttggggcaggcacgccccaacaagaacacttcggaaactcgcaagagtttgagaagtgaagtcccggatgggcagaaaattttcaaaaaatgaaaatttgtggccacgggacgattcttgctcttacctaatacgctcaaattcgattttctgtgattgtttccagattgttaaggcgcacaagcagcaaaggaacttctttcttctaaagtggtggtgctcaccgtgagcaccaccacttttctatttattgtggaataaggaggtggcaagctatgacatggccttttgaaaatgataccagtgacattgaaaagaagctggcaaagcgcagtttgcatcgtgaacggcagcgtaatttatttgcaatcattgctcttgtgctaactgcatttatgataactgcgacattcagtattggttttagttactttgaaacctaccaaatgcaacaaattcggttaatgggaactaccgctgatgtcggaatcacaaatgtaacagaaaatcagttggttgaaatttcaaaatcaaaccttgtccttgacgtaggtatacagcagcgtttaggcagtgttgatacagagcaactgcaaaatgcgagattaggtatagtttggatagatgataccgagtggggaacccaccgtctgcctactatatcaagtgttgtaggaaattacccatcaagtaaaaacgaaattatgctacctacatgggtgcttgaacagatgggcatttctgatccgcaaatagggatggagattgtgttgtcgtaccaaattggcgatagctataattatgtctcagacacctttttgctgtcgggctactatacggactacattccaatgcgcacaaataatcgtggttatgtttatgtttcatccgcttttaaggatagcttaaatgtatcactggataatagtgttacggcaatgatccgttttcaaggcaatgataatgctgacaaaaactgtgaaagattgcggcgtgagattgactttacagaagggcaaacatttgaaattgtaccattagaacaggcaaatggtggaactattattttagctgtaataattttagcagtttttatatcctttagcggctatctgctgatttataatattctttatgtctctgtcgtaaaagatgtgcaattctatggccgtcttaaaacgattggaatgacccaaaggcagataaagagaattatctataagcaggcaatcagaatctcttgtattggtattccgattggtctgttacttggtgcggttgtttcctttggcattgttccttacttcctgaatatgatgtattcaacaaattctgatgtgggaacaaaagtatctttttcgccgtttattttcataggagcggccatatttacgttcattaccgttatgattgcaagcatgaagcccgccaaaattgccggaaatgtttcaccaatagcagcactccaatatacagcagccagcacaaagagcagcgccagaaattgtagcaaaatgaagttgtccagaatggcatggaacaatgtctttcgtaatgctaagagtacaacccttgtttttgcatcgctttttttcggcctttccttgttccttgtcgtcacagggctattacatggtttaagcccggagaattatgtgagccaatggggagtaagcgattttgcactcacatatagtatccacgaaagagaagatttaatttccagcgaaatggtttcagagattggtcagcttgacggcattgagaatttgaggttgacctatgcaccttatcctcaagtagcagcagatgttgtatatgacgatgctgtatttcacgagtttcttgcgtcattagacggagtaaacggcattgatttttctgatccggcaaaattagaaaattatcagcaaaacttttttagcggggtttttggaattgacagtgcatatttggaagaaatcaataaaaccttaaacttgcctattgacacgtctgcctttgaacaaggaaaggttgtgctgctgtccaaaacagtagaaggccttattcagccagggcaggaaataacaatccagacgcagaacggacagcattcctttattgtagcgaacggttatttgaatgaagggtttcgagcaggaggaggcaatgagagagggacggctcctgatttgtatattagtcaaacagctttgaaagaactctttccgcaatatagagtgttccgcgtggcctttgatacggatggtcaacatgacgaaagtatactgcaagaattaaagcaaatcaccgcatcacaagctaacattgatattatatcccgatatgaacggcgagaagaaatgcaggaatatctcattacagcaaaggttttaggaacagggttgtccgtgatcctgctgcttgttggtgtcatgaactttgtcaatacaatggttgtcaatgtaaatactcggcgctatgaattagctgttcttgaaagcattggaatgacaaagcgacaaatcaaacgaatgctatttatggaaggtttctattattggggcgtttccctttcccttgcagtcaccattggaacagcaatcttcatcttgctatatatgatttttagtaaagtggcctattatgctgttttctcctatccatttatcccactggtgctggtgtctggactggtgttgctaatctgccttattgtgcctatatgggtctacaaaactgacgttaaccttccagttgtggagcgattgcggttgacagagtgagtttaatcaaatagcaaaacatccttagatcaatcatatcgaagcggagcagattttagctgctccgcttctttagtatttttcaaaaaattcttttgaaatgtccgagctttgtaacaattcagcctgtttttctgtcgaaatcaaaggcacctcggacatttatagttcttccaaaagtttgatgataatattaccattcatggaagaagcaatctgttattacaataatgcgaaattgacgatagtgccatcattaaattgggcttccagccggttggtgtccatgttgtagcggcaggaaagcactttttgagggggattatggtcagaattctgatttcgtttcatttgaattgctccttaaatgatttttgggtttgtttttcaacgagatgaggtctctttttcgttttttcttaaatcacccatccgcactatcctgcatcgcaggcgttcaccacataatcaaatttcttgctgcggagcagtttgcgcagaacattgaactgcggcttcttggtattgtgtaccagcagtttccactcaacagggagaatcggcaaatcctcaaaacgccagttttcatagcgttcatcgtaatgctccggggctgcatactctgccagatgccccagacaccagcttaccacgcaatccccaccctccagatacccgtcctcctgccgatatgcaccgatcacttttgcaatggatttcgatacactcggtttttctgcaatcaccagatatttcaacgctttctcctttttgaaaaaagcagggatagcctttcgactacccctgcatccttatgttacggttttcttatgtgccattttcgttgtcggactgattatcctcgttcacagtcgcaaggctctggtcggtttccagattttcactctgcggcgtttcttctttcggcttcggcttataaatgtagaagtagaagaaagcacctgcaccgcccagcgcagccacgaacaccagcagcagaatcttattcatgccgccgctcgattcctctttcggttcttcgatttccacatccggggtgggttcgggtttggtttcgggcaggactaccgcaggcgtttcttcttcctgcttgccgttccgctcttcatcgtccagaaactcctgcaaatcgtactcgtcgatcatcgagagcatatagacgttttcgctgttccgcgcccggtcaatcaccagaaagaacgtgttgccgcccttggtcttgacggtaaagaactccttgctgggatcatctacaatgttgtcctctacctcgccgttgcctgcgatggtgaacggaatcttttcttcctccgtcggctctgcttcctcgatcacctgcacaggttcctccgtcacctcagtggtgtccacaaaggcaaaggccggggtcgaaaagctcactgccatcagcagggtcagaattgtgctgggaataacaacacccagccgtttaagcatcttcttcaatcgcttcctccgtttctgcttcttccgaagcgttgtttacagcggtcaggaacgtcacgttgcccgcctgaatgttgtccagcagagccagcagttcgcgccctcccatcttggtgctgcggatagcgcgaatgatctcgctgtcctcttcctttttctgtgccgcccggatggttctcagccgttcttccagttccgcgatctgctgttccgtcttttcggcttcatccagatatttctgtaattttttgcccatcggtcctcctttcagttgatacggccaaagcctaaaaagtgcctcttccagtagtttgagttgatgctggtataggaaatggggtcgccgcagtggatcatcatgccattgccgacgtagattccaacgtgcgacgcgccaacggtgttataggttttctcaaagaagatcaagtcaccaggctgtgcatccgcaggagaaacataactgcactttccgcgcagaccgttggctgttgtacgcccaacgctccacccattgccgctgttattgatgacccagcaaacgaagccggagcagtcaaaactggtgcttggggaacttccgccccacacatacggcataccaagatacttttcggcttccttaatcatccttgcaaacttttcatccgaaagggcttccgagggaatgtcgtacttgaatccaccgccggagccaccagtaccgccgcccgtgccaatactgccagttgtgccgccgctgtatgtcggggagcctgcaccgaacagttccgggcggttgccgtaggtcaggttgtaggcatcgtatcgcccggtctgcttccggttcatgttcttccgcgcgatggtatcgaagcccttatttttcagcaggacattgaggattttgtattcatactccacttcttcctgataggtataggtttccatgctgacatttccaaaagcgtcaatcgttggacgaacccctactctggtttccatgcgagtgcgaatctcaatggtttcccacactttcaggagatactgctgcttgaacagttccttgataacaggcttgacctgtcctctagtgaactgctcatagaccgcagtcagatgggaaataagctgatacgggtcatgcccgatttcgtccagctgatagcggtattcatcatagcccggatgggtagattccatctgccgaatctgcttatccagttctttttccagttccagataatcctcttccgcacctttcatgtcagcatccttgctggggtaggtcgttcccacaaaggtactgccggttccctgaatcgctgcaccacagctcgaaaaggctcccagcatgaccatcaccagcaggatgccaaccccaatactgacccacagggttttatgctgcacgacgatctcctgcaccgccgctttcgctttctccgtaatggtgtttgttgccgctgctgcctgcttgctggcggcagttccggctttctggccgcgcttagcggctgcataggcatccttatactgctttttctggtaaaacttcgccccgactgtttttgcttcacctcctgcggcagtcggtggcggctggggctgtttctttttcagcggcggttctgctgcattttctgccgtgccgccctcgctctcggagaatttcagacggctggatttctgatcctccccacctcttttctccgctctggcagatttatctttgggcttttttctgcctttgacaaagtggtgcaggcgttcagctgcttcttctgacttgtgtgcagcttccacgccggaattgtccttttctacctgatgtactttctgatgggcaaacccggtggcagcgtctactcctttcttggccaccttcttaacgcccatccccacgccacagacaatgccgcctttttcatcttcaaaagaaagtcggcctttctttgtgggctgtggctctgcatccgatcctgcaggcgcatcctttggtttgccctcctcctgatgggctttataatagtctgcgctctgcttggcggtgctgtgatgccggggtgcatcctccccatcctcggcatccatgcacagttcttcatcggtttctttttccgcagtttcttttgacgaatcttcctgctccggcttttcttctgtagtcgcggacttctgttccccggtgcgaaggttttcatccaccagaccatccttggtcattttctggacgattttatctctgcctcggaattttttatctgccatcgggttcaccctcttcctgccggaactgtcatgcgatcagagctgcgtgggtttcccacttgtcaagcacctgttccagcttccgggcaaaggcgatcagacgggcattcacttcctcacggtcaagataaccgtgggcttccatgtgaaagccgtcagtcagctcatcggccagtgtgccaacggcgtaaaagtcctccagcaccgtatgtaccaccgattcttcatcgtggaagttgagcggctccacctcaccaaagggcgggccggaatcgctttcgtgcggctccatgtcagagtgatgatgaatcttacggctcagtcggtcaaaaatgttcggtgtgttcatgcttcttttttctccttatattttcccatctcattgggctttgtggtcatcaggctatacagtttcagcgatgtatcaaacttatccttgaacgggataatcgtattgccgtagaacagcagcccctcgccctcgttgctgttcgtaacataggaaagctggaacggcgagatattcagctgcttggcaaggatttgccgatcgccggatgcctggttaagcatataaatgaaatcgctgttctcaaagatgttctcgatttcccggcttgcgagcaaatccttgatgttctgggtgatgcctgtgggtacgccgccccattttcggaaccgcttccagatctcgacgctgtatgctgcggtctgttcctctttcagcaggaggtggaactcgtctatatagtaccgggtgttctttttgctgttgcggttgatggtgacacggttccagacctgatcctggacgatgagcatacccagttttttcagctgtttgcccaactctttgatatcgaaacagataattctgttatccagttccacattcgtctggtggttgaacactcgcagcgaaccattgacgtagatttccaacgctgtggcgatacgctgcgcctgccgctctttctgctcccgcaggcagtcgtacagatcaccaagcgtcggcatattctctggcttcgggtcattcagatacttctgatagaccagcggcaggcagcggtctataaccgacttttcttctggctccatgccatcccgtgcgcccataatcagttcgcacagggaaagaataaagtccgatttcatgcccagcgggttatcatcgtccgcatagttcaggttgatgtccatcgggttgatgtagtccttactggtggacgagatatggataacctgaccgcccaacgcttccaccagcggataatactctccctccgggtctgcaacgataatatcgtctgttgtggtgaagaacacgttggtgatctcacgctttgcactgaacgacttaccgcttcccggtgtgccgaggatcaaaccattggggtttttgagctgcttgcggtctgccataatcatgttgttggatactgcgttcagaccataatagagggaatcgccctccataaaaagctcctgcgtggtgaagggaacgaagatggcggtggaagtggtggtcagtgcgcgcttgatgggaacgaggttatttgccagcggcaggctgctcataaggccctgttcctgcaaataatccagacggttcagagtgcagttgaacttctgcgcgatgccagcagtctgaaaaacagcactatccaattcctgtttggtcttggccgtattgagaaacaacaccgtaacaaggaacatacgctcattgcggctctgcagatcatccagaatcttcttggcctcgccgccataagttgcaaggtcactcggaataatttccatatcataaccagacctcacagctttcttctgttcctcaattttcatacggtccaggtcggtaattttccccttaatcagtttgatagctttcagctgatctaccgactgcacatgaatgctgaccaccagatttttgtccatgtccagaaattcggccagcaccttatccgtcagttccggggcaaggatgttcagataggatgcagcaccataggtatcgcccatcataaaatccttgccactcttgaacagaaaactggtcggcgcaatgaaatccttggtggtcatgccgctctgcaggatgcgatcataactgaaatcgaacctctgctgttcttcctgatgaaaggtttcgtacataatctgaaggcgttccacgccgttcagcgggtaggctttcacgcccagcaccttgaaattattgagaatatcggtttcaatacgctctaaccggggctttgcttcccggacactctttgcttcgatgctaaacgtgatgtacttcgtgcgaaccagaccgttattgcccttggcaagctgttgtttcaacatctgcgcatattccatacgcacatcgtcaaacgcgtcgtgctgcggctcgatctggattaccttgttgtactcgctcatatcgctcttgtggttgatgaacgacaactgaaagcggatgctggcatcgaagtagttgaggaagtcgcaccagctttcaaagatggtgttcttatcctcgttctgtgccagctggtagttaatgtcgtagaatcggacagttttggagtacagatgttcctccactcggcaaataccgtcgcgccccatttccagatatggaatggaacgctgcacggtcaaccgttgttccttttcgttcctttctggtttacgaaagaacttttggaagaagccgccgaaatgcggtttcttcttcggttcactttttaccaaggatgcctcctttcttctggatcggtgctgcggtttccagttcccgctcatacaggttttcgacctcatagcggcgtaccgccggacgtttgaatcggacgctgatgaaattcgtcaggatggtttcaaggtgcatcccgtttttctcgtacagagcaaagaaaaactccggcagcatcagaagcaccatgcctgccgccgcattgctggttcccagcgtatcacgcataagaaaatagaacggaacgccgatgcccgccgcaaaacccatacacacaagctggcgtttcgtcaggttcagaaagactttattcttcactttggaaaggtctttgggaatcgttacataggccatggattaccagaacagccagaccgccgccgggaaacggcgttgcctgctgtcttttcctttcattggattttcccggatttagtgactgccgaagatctgtttggacagacttcccgttttgagcagcgagaaacaaagaatcaccgtgtaggccattgtgccgaacaatgccgagtgaatatccgaagatacccggatgctaccgataagggctgcatagattgccacgcagaccatcatcaggaacgcctggaatgccagcgcgaacagccctcggaagtagtttgtacccacatggccccattcacggttactcatggttgcaaatggaatcggagcaagcgaagtgtagaggtatatttctatcattctgccgtacataatcaccgtgataaccaccgacagaattttcagacaccagcttacaacaagggtttccaatgccagcgtcaccagttcgccaatcgccattgttgccattgccgcctgcatctgcatggaaagagaactaatatcaatggcggtattgccacggataatgccggaggaagaatttaccaccgactgtccaatgtcaaataccgccattgcaatatcgaacgtatggctgacgagatagaccgcgatccacatcttcacgaaatacttgaagaacatccatgtgtctacatcgtgcagattgttccgttccgtcagcatcgaaatcagttcatagcagaggatcagcgtaatgatgattcctgcaatggggatcaccaccgaatccgaaatgttacggatcatgctgaaaatgctactgttccacccttgcggtgtctgcccgacctgagcagcgatttcactggtctgttggttgaccgctgtgaacatcgtactcaggttggactccaccatgccggaaagaagttccctcatccatttttcgattgctgcgaaaatattatcgaacaatggcgggttttcctcctatcgcttgttgattagccgaacagaccagaaagcagcgggatcagctgggtgccgatgaggatgacaccgccgccggacatcagctgcttcatgccctgcgactttgcgccggggttgtcgtttccgtacccttccatgaggttcacaacgccccaaacaccaaggcccgcgccgatggcaacaacgagagtctgcagaacggtaatagcctgattgaagaattccatagtcgtttttcgccagattgcagtattgataaaaaacacgattccaaaagaaaaacaggctggcacatcttcggtgctgcctgcttcctgcaattctggcttctcctttcattttcataaaaaatcagccttttggaatcgcaaaaatgtagagatcagtcggacaagtcacctgccacgggatctgcccggacaggcgggctggtgtatttacttcggataatggcctccttcctatgccgtgctttcttcggacacatccacctcgtagcaatcaaattcttcatccatccgcagccttagttcgtgcttcaggtagcgttccacatcgaaagcgttcttcttatcgaagtccgacagttctttgtaccgcttatgcttggtaatgtcgaatttgtcgctcaggaatggccggacaccgcgcagctgcaggatacacttgctgccatccatgacagaaagttcgtcccggctcataagctcctttccggtcttttggtaggttgtaccaaaggatgggctttgaccgcgtgtgtcggatgtgttatataggtcgatggtttcttttcccagcgtttcggaaatttctttgagggtcgaactttccttgccgccgaggaacagcatggtatcgcagttgccgatgatggtttctgcggcatccttgtagatggttttcaactggctctgcgactgcaggatgatggatgccgaaatctcgcggctgcggatggtggcgatcagcttatcaaacttcgggatcagaccgatgttcgcaaactcatcgagcagcagccgcacatgatactttagctgacctccacattgatcgtctgcacggtcacaaagcagattgaaaagctgggtgtacatgatggacaccacgaaattgaacgtatcgtccgtgtcggaaataataacgaacaaggccgtgcggcgatctcccagcaaatccagttccatttcatcgtaggccataaggtcacgcagctccgcaatatcaaatggggctaatctggcaccgcaggaaatgaggatagatttcgccgttttgccagagacgaaaagtcaaggactttttcatcaaattcacaaacaagttacattttgctgaatctcgttgcgaagcagacgcttgattttgtcctccattgtctctctggcgttctcgttgaagtggacacggacgatataggtcgtgccgtttatctgctttctgacggtgggtgcggtgtgctgggtggtggtctgtgctgctgtgtttctgttttctgtcattcaatacctcctgtgaatgaaaaatgcccgacaaggaaaggctgacaacgaagtcctgacaacggacattcaaaaaccttttatcttatcgggcggctcttattgcttactatttactttttctttgaaatcttggttgtcaaggttgtcagagagagaaaagtccagtcttgacaaggctttttcggattttgcccgacaacgggattgacaaccggctcggcaacaagctgacaacaggatagcaattttctatcgccatccctccggcagttccatctgttcaagctccgcatcggagagaggaataaatcttccgtctccgttgtcagcttctccgttgtcgggcaactcacgctcccaacctttctgacgaagatacggcttcgggaagtgtctcggattgctgaaagacttccaacctttgacaacattgttcataatgtcgtttatctctcgcagttcccattgcttcggctcgtcatactcatgccccaatgcttctctgtaaagctgtttggagcagacggcattgcctgtgtagctgtccagataatcaagtatctgtccggctttggtgtcctccggcataaactccctttgatgtgctttcagatactcattcattgtcgggctaaaccgcagcttgaagtctctgcttcggtagatcgccattgcttctgcccacatctgatgaatgtaggctctggattcttcctcattgtcgaggatatgcacctcggctctttcggggtaaaccatgaccggcacgaaacggcggttgcctgtgcggtcaaggggtaggaagtccagagtatttgacgaaccgccaaacacgcattgtcgcttgcggtctgccggatgtgtctcataggggactttgtaggtctctttctgtctgctcaaaaaggacttgatttcctcaatactctttgcattggctgtggctatcatctccgacatctcgattatccaatgcccttgcattttgcggtacacattttcatcatccagctttttaaggtcatcggtaaaccaatcgtccttgaccgcaagcagacggaagaaagaggactttccggctccttgccctccgacaaggcatagcatgacttcaaacttgcaccccggcttaaaggctcggctgattgccccaagcagaaacagcttcaaggcttcataggtataatcatcggcatccgacccaagaaagcggtgcagacaaaagcgtatgcgttcctgtccgtcccactccaagccgttcagaaaatcgcagacagggtggtagcggttttcgttggcaataaccaatgcggcatcctcgattttcttctcaaccgtcaagccgtagtgttcttcaaagtagagaagcagatatttaatatccacatcggtcagagtggagctttcacgataccaaccaagcggctttacaatgtcggtgcgttccgtcaacagatttttgcggatagcacctttcagtagagggtcattctgaaataccgtcttgtaattcatggcggtattcgcaggcttaccttgctgtgtcagttctaatcggtctcgaatttcctctctggcggctgtctgcaaatcttcgttcaagtttcatcacctcgtttctttgctcggctacaagtgcctttctatcttcaagtgttccgtcaatcaaaatatcaaggagatattcaatataatctctcttgttcaaggcttctgtaaatagcggatgccattcgtcctctggctgcttcggtgcatagtccttttcccacgctcggagcttgtggaagtaatcggacagcacacgaaagcaccgtttttcctccgcttcaaacttctgtttggcggtaggctctcggatttttgccacgatggacggcttgccgtttcggtcataagcgataccgaaatcgtcagccagtttcatagcggcttctttgctcggcaattcaaacagtcgggaaacaaagtcaacggcatccccatccgcaccgcagccgaaacaatgaaaacgcttatccactttcatgctcggtgtgcggtcattgtgaaacggacaggctatcattccggctcggtttacacgaaagccgtaaaactctgccgcctgccttgtcgtgaccgactgctttactgcttcaaatacattcattatcaacctcccaaaatggaaaaagcacctgtcattctcaaatcgaaaatggcaagtgccttaaagctccatattctgttttttgtgcggacggtgttcgctccgtctcgcttcattttcctgttttgccagttccttgtttctttcaagtctggcaaggatggagggcttgaccttttccttaatctgctctttgctcgttttcttgacctccggcgaaagaagtctggactggattttctgcaatgcagactgcatggcatttttgattttgccaatcacgccatccaaacggctgattgcatagtcacgctctttcttcggtgctttgcgttccggcgattgaagccatgtctttgtttcctcaatcagccgaatgtcctccttgtgggtttccactctgactgtatctgtcacgacctccaccgccttgtcataggcaatatcggcaacatcatcaatcagcgtttccacatcctcgattttcaaagtcagttcctctaatctctgctcctgtacctccaactgctctttttgtttggcaagaatgaagtcctgtttttcaagataggctcgccctccatattccggctcttgctccaaatgcagaccatgcctttttgcaatatcaaagagcatggcacgacaggcagaatcgaaagtcatttttcggttgttgtgtctgccttgcttcttggtggggtctggcagttcaaagcctaatgcttcaagtgccttttcctgttgtgggcaaatctcgccgtagcggttttcacagtcgaatacatggcgttcttgaatgtgcggtgtcgcttcatccagatgtaatgcccaatccagaatgtgaacatgagagccgaaacgccgttccatctccacgaagaaatccgtcacgactttcagcagaacatcaggcgaaacatggtcgcccatctttccgatctgatagatggtttcctccgggcaagtccttttgtctttaagcaaatccgttgtggtgcggttgcgttccgagtgcctgttcttatcgtttctggcgttctgtgcttcgacataagcaccgtattttgcggagtagaacagttcctccacttcctcgaaagtgtctgcaagctcgctctggacttgcttctctgcaaaggtgcgatagccgttgaagcagtcccaatagacattgtgcttggctcgttcttcgtcaatgtgttcgctgttgctcacatcaaaagtgcggtcattgtgcttcgggttgtaagtgccatgcttgccggagcgaccgttgtgtcttgttaatttcaaaccatttctaacctccgttcagattttccccgcaggggaaaggggcagcgaagctgccatccttgctgcaattttgcgacaagtaatacccagtactaagtggcgaaacgccacttaactgggcaaggctgccgcccttgacctgcacagggatattgcattccctgtacccatgcacaaagggcttgccgccctctgtactcctgcccgataaactgcttcacatcgtcagctgccgacatttgcagtccatcggtttttgcgaaactctccatcggagactttcacaaaaaaatggagaagtccaatttcgtcaaatcggatttctccacttttcggatatgccgtttccgacacatccgctttgcaaatgagcaaagcaaaagcgaccaactttttacggttagtcgcctttggtttgttcattctattcagtttttacgaaacaagagagtttctaccattacctttctaacgctaagtattcttgccccataaagaagattgtcaattcgtcatgatctacttctatctcaaattctacactactatctccctgtgtcacgcagattatatccgagtaagaaaaaccataagatgcgttaccgcaggacagacccgaatcgggcatatctttactcacagcaagttccccgttctcttgaaaggtaaatacctcctccgcatttgtatccttccatgtgccaataatatctttttcgttctgaatgcgatttactttaccgacacatacaatggcaagtataactacaccaacagtcaaagcaatgcctgcaactctctttaccagtttctttttacgcaatttctattacctccgtttcagttgctttgttagattgaatgattacatattgctcaatttcagttcctctacaatttccacctttgatacgcttctgacagcaaacagcatagcgatacataccatagcaccgaccgccagaactgcaagagcataaataccaccgttgatataaaaagcaaatggtgtcatacccgacgatatgaagtagtagatggcacaatgaatcaaaaagctcacaggcaacgcaagaaccaatgcttttacgccgtacaaaacagcttcaagcaatagcgtacatttcaatcctttggcagtcataccaacagaacgcagaacagcaaattcgcttcttctcaaatgaattgtatttgagatagtgttgcaaacattcaaactgataataaccgtcatcaggatcgagaacaggcagattaccagttttgcaatcgtatatacctgtctggaattattcgttgcggctgcaatgtccacagtttgcggaaatcctctgtcagccagacagtccattgcttctttatgctgtgctgtctgtattctcatttccacataggcgttatcatctatcagccagttaaaataacttaaaggcacaatgaggacagctcgatctctcacaaacatggattggatatttgcattttcttctgaaacgatttcttccacgataatcggcaaggcatcctcggatgcccccaacggaatgatttcagttcccggttcaataagaaacggggagcctgcaatcactcgattttgacccgcattataatatcccattgtctgattgagcaggattccacgattggagctgccagtcataatatgaaagccattttcctcacaaaaggaagtaaaatgttcttcgtccagtcctacgacatatacctctgctttcgtaccattgataaaatatccctgcatatcaggattgatttgttcctgcgaaaattcagcagtcatatatcgctgaaaagaataggaaacatccgcagtgatattttcatccgataatgccccgattgcggtaggaatatctttgtattgaatcgtcgaaatcacatcagtataacaggaaccgtcctccttcatgtccaaggatgtctgataaagcataaaatcagacaaactgtataaggaaagggcaattaccaccgacaagaaaatagagccagtaattgctcggaagcgttttggattacgcttaatatttttagctgccagcgaaccataaatgccaaaaaccaaagaaacgatttttccatcacggaatttcttttttgataccgcattgttagactggcggatagcttcaataactgtaattttagcagcttgcttcacaggctttctgcttccgaagtacaaagaagcaatgccggataatccgctgacgagtaggataagtccgtttacctttaaggacagttctacaatgccaaaagtgaatgtttctccaaaagctgccctgaccacacttaacaacagagcagacagcagtatgccgacaaccaatcccaaaggtatgcttaccacacccaaaagaaaggcttctaaatatacactaaggcgtttttgcccttttgtggctccaatactggataacattcccatctgcttaattcgttcctgcaaggaaatggagagggcgttgctgatcattgaagcggatgcagccatcaaaaggcaaatgaccatgactaccaaagcaatcagtttggcagctcctttgccgccggtaattccatgatagactaacagttcagaatgaaactttgctacatgactgtctactgccgcagccacttcttcggcttctgtatagatcgaattggataaattctttgccttgacatacgcagcaaaatcggatgccgttttgtcaacgcctgcaaaggcattatagtttgctgcgatttttgagtcattcacatctgacagaataccaacaactacatacgctttctctttcgttggaacgaaactttcttcttcgcccctataatttgtcagcccggaaagctgggcattatattcatcccaaattcttgaaccaagggttaaagaaatcgtatctccaatctctgtgttcatattgtttttcttcaaaaaagattctgaaataacaagctcattttcatcttgcgggaaacgccccgcaagcaaatactgatttaacgaaaatctttgggtaaagttctcgtcaatctcgccaacggagagcattgtactgttggatttctccccgtaaaaactgtttccggcaaagcggagaagcgaaacctcgcctacattgttttgactatatagctcttgaacctgctcccaagtcaaatcctccatgtagtagtcataatcgccaccatacactttttctttctctttcaaaaaatcaaccaacgaccatcccccacagagaatagcggttatcatactgattgacaaaagaatggttaaaagtgtgagtagggtacgctttttattcgacagcagattcctgagtgtaagcgtgaaaatcatattcatcagcgtatcacctcatccctcacaagtctgccatcctgaatttccagaatacggtctgcctgcattgcgatttcacggtcatgggtaatcaggatcattgtctggcgatagacttcattggattcacgcagaagtttcataatatcccttgtgttctccgtgtccagatttcccgtcggctcgtccgcaaggataatcgcaggtgcgttaatcaacgctcgtccgattgccactctttgttgttgaccgccggataactgacttggcaggtgctttctacgctttaccagtttgagcgtggatagcagttctttcaaacgctccttattgattttacgcccatccaatcgaatcggcagcgtgatattttcctcgacagtcaaaaccgggatcagattataaaactgatagacaagcccaacctgccttcttctgaatacagccaattcatcttcgttttgctcataaacatcctgtccatccacaaatacttttcccgaagttggtctgtcaacaccacctaaaatgtgcaacagggtagacttgccagacccagatgctccaatgattgcaacaaactctcctttatcgacggaaaaagaaacatctgacaaagcatggacaggagcattgtccatttcataggttttgcagatattctctactcttaatatttccataaaaagttcctccatatatttttgcaattcagtatagcaaagccaagtgactgcttcattactttttcattacaaaaatgtcacttaaaaaggggctgcattaagcagtcccccgataaaagcagatttcaaattctgcaccgcctgacttccggtttttcgcctggatgacgccgccctgattgacgatgattgtttttgccagagccaaccccaaaccggcattaccgattgtagagccacttccttgataaaatcggtcaaatagatgcggtatatcctttttccgaaaacctgctccattatccgctataatgatctgtgtcaaaagaggtctttctattgccttgatttcaatactgctgctctctggtgaatgttcgatacagtttttaattacattccccaaggcttcagcagtccaatcagcatcaagagcaagtttcagttctgccggaatcacttgcgttattgtctgcatttttaattctgccgcaatctccagaggacgaattgctttttctaccacatcttttaagtatatctcctgtggctttagagtaatcgttcctgcatccagcttggatattttcagaagtgtggctatcagccactccattcttgataagagcatagtctgtttgcggatcagctcatacctttcttcgtcagtcagttcctcattacacagagaagcatttaggatattcagcgatgtcaaaggtgtttttaattgatgtgaaatatcggctaaagcattcgccaaattacctttctccattttcagagcttctgcctgttcaataagtcgtcttgtcatcttagatatttcatcatgtaaaacagataattcgccttcttgaaactgcccaaaagaaatcgtttcatctccatgcagcagcctatcaatatgcaaactaaaatcagcaattttcttgtatctctgatatgtaaaaaagagggaaactgcacttgatgaaatgatagccgacagaacaatccacacagctttgctatcaacgataatgccaatgccgccccaaaatagaataagaatactgctgacaacaatctgccttttaacttctttatttctgataaagtccatatcaacccaccttatagccaagcccacgaacggtaattatgatttccggctcctgtggatttgtttcaattttgtcacgcagccttttcatgtaaacagtcagcgtattatcattgataaactctccggtagtgtcccataaaagctccaacaatcttctgcgagaaaggacaatacctttgttacgcaaaaagactaacagcaacttatattccatagcagacaataaaatctctgttccgttttttaccacggttgcttgatttgtgtccacaactaagtcatggtagctgataatgttttgcgtgttcttagttctccttaatacgctgttgatccttgaaagaagctcccttggtctaaatggtttactgatataatcgtcagctcccatgtccagtcctgccacaacactatattcatcatcagacgccgttaagaaaataaccggcatagttcctctttctttaattgcagaacaaacagaaaagccatttccatttgataattgaatatccaccaaggctatatcgtattggtcgttatccaatttttctattgcttctttttgcccggaagcactttcgattttgaacccttcatttcctaaatagtccgataatgaggatacgatactttggtcatcctccactaataataatttactcatcatgtattctccttgctgaaaggatttctggcatcattgcctttttcgttaggtataaattcaagaatatcatcaactccgcaatggagtgtgttgcatatcttttcgatggtgtcaagggaaaggtaattatctcgtttcaatcgggttatgatgttggcactaaaacctgcctgttccatcaattccgcattgctcatacccttgtcaatcattaaatgaaacaactttttatatgttaccgccatagcttaccctccttgtgcttacatattctattattatatcacgcaagtgtgaataaatcaacactcttgcggtaaattcgtagttcatattagctccataacgcatacttttccttttttgggtaggtaaggactttataccttgacgatatgtaacagtcaaaacatcgggtacagacccgacattttgaccgcaaacagacccgaaaagctacattatccgttctgaccgttaaaaccgttttgcttcgccaattcgcttgcttttcgtctgcgttcctcgctcatgggcggctgaaagcggatagacaatctggacttgtcaatccaataggacacaccgccttgccccatactcatatccaaacggcagaggtcggggtacttcttgctgaacgcttcaaggcgtttccgaagtccggcattgtaagtctggatatgagcttcttcgtctgcttcattaaacaggacgattgtttctttctcatacttcgtcagcttactcataaagcccctccataatcggaacaggatagctgtccggcacatacttgtggtgagcaaagcgttccatttccaccctcatgttgtagaagaaacagcgataccaacggtcacagtccttgtcattcaacttgactgccagagcgaaaaacagcttcttagccgcagggtcgggagcaagtgcagccacaagacgcaagcgttgaacggtcgcttctcgattcggacagccaaaagcataaagagctttcttttcattgatgttcatattcatagtgggttcctccttgaaagattaagatttaaggttaataaaagcaacaagcatttcacgaagaacgaaacacttgccgcttgaattacggtattaaattgtcgggttcagaccttgtttttttaatcctctttgggattgagtggatattcataggcttctttcataagtagcaatcctgtggacagtccgcacttaaaatgctcggtgctttcgtactgctgaataatcgtcattcgctgatgaagctcctccactttggaaaagtcagcttttgaaaacctgttcgccagttcgtccataaggtcggcaatggctttgacctctgccttgtagccgtcctgttgcggtacaatgttctccaatgggtacatatcgccgccgaaaatcgcttccataatcatttaatcaccccctccgctataatggcagtaaatcatttcatgcttgacaatttcctcggctcggttgcggatagagttcatagactgcacccacaacatctgattttccgctttcatttgctctgtcacgccctcggctcttgccatctgctccataatcagagagaagcggtcatttgcctgttcgttcagatccgcaaggacggaatgaagccgacaggacaaaacaagctcgttgtaaacggtggggcggtagttctgcaaataggctttgtgaagtctgccccaatgcccgataggtcgcttttcctccggcagcttcaaatccggcacatagtaatctcccacaaggacatagtcaatgccgttttcatggattctcgctttcagttcgttcatgctgtgatagctcctttctgtggttctcgcttcggaagattgctgacagggataaatacgccccttgcaatatcctcggctcgaatggcatttttcttttcgtccatctcggctttctttgccgccttgattttgtcctcataacgcttctgggcaccgctggctttacgcttcaagtagttctgatgaagtttgtccttgcgttcctcacgcttgcggatttcctctaattcttccggtgtaagctccacttcggcaaatgccggagggacgaaacgcccgacaaagttaaagaagatttcaacctcttgcgtagtctctcgactgccttttctggctcgctcatggacaaggattttatcgacaaactcattgagcatggtatttgtcagcttgtcgaagttctgatacttgtcaatcagagcgataaagcggtctgcggatttctcatgcttctcataatctccgacagccttttcaagtgttgcaatctcggcggtaagtgccgcctgttcctttgcgtactgtgcatccagaacggcatatctggcatcggggagcttgcccaatacattgtcctcataaattttacagagcaaaacttccagttctgaaacacgctgttttgccgtagcaagccttgtgcgttgcttcttgacctcgcttgtctgctgactggactgtgcttcttgtaccactcggacaaactcggctcgctcatgctttgcatactcggctatggctcggagcatatcggagacaagggaaagtaccacatcttcattgatacggtgctgtgtcttgcagagcgttccacaagggacttttgtgtactgtgagcaagtgtattgagagatacgcttgccgttgttagtgcggtggacatacatcttgccgccgcaatcggcacagtagagcaagcctgtgaggggagcagcttcgccccatccatcggggtatcgtctgaccttgcttcggattttctgtgcaaggtcgaaagtctcttggctgataatggcttcgtgggtattctcgaaaatcgtccattcgtcctccgggacataatggcttttcttgtccttaaagtgctttcgggtcttgaaattgacggtatgaccgagatattcacgcttgtccaacagattgacgatagtggaagaaccccaaccgtacacatccttgaaagtcttgtttttgttcacgccctcgttatgctgtgcaaggtaggcagagggaatgagtatcttgtcctcggacagcttctttgcaatctgatacggtccgtagccgtcaatcgtcatagcaaaaatacgcttgacaacctcggcggcgtattcatcaacaatccattggtctctcgtctcattccagagataaccataaatgaccgtccctgtcagatgcttgcctgtcatgcctttggtcttgaaagtggacttgattttgcggcttgtgtctctggcgtagtattcgttcatgatattgcgaaaaggggtaaaatcatcgtctcctctggcactgtccacaccgtcattgatggcaatgagacggacacctctctggcgtaaaatctccataatctgaccgactttgagataatcacgccccagacggctcatgtccttaatgcacagatagtccacatttccggcttcgacttgccgcatcatatcaagaaagccgggtctatcgaaacaagtcccgcttattccatcgtccgtaaagtggacacagtttgtaaagccttgctgtgcggcgtattcctccaataattttttctgattggatatggaattactctcgccttgcagttcatcgtcacggctcaaacgctcatacagggcggttattttctgtttgctcatgggggtctcctttctgctttgtagccttatatgttttaagagacttactcatatcgtgatgaataagtctcttaaagcatacaacacctgccgccagcttatacttcttatactggcgaactgcaaaatgttccggcttcttctgttccagttcctcaaaaagctcgtccacaggattcttaaattcttcgtcatcctcacgggcttcgctggcgttgatgaactccagcaaggtggagaagttctgctcctcctccggggcctcataccagatatagccaatcaatgcacagtagagcagccgttccgctttgatccagaaatcctcgccggatttttcgccatccccctttgtgttggcgatgatggtattgaccagcttcagaatatccttttcgctgcgaatgtaatggaacggattgtatcgcatggattttttgaagttgatggtgttcaggactttgattttatacccggcatccgagagcatttttccgcactcgataataattgtacccttgggatcggtcaggacatagctgaccttttggggcatctgcatcaagttaggcttgacataaaaccgggttttaccgctgccgctgccgccgatcacaatgacgtttttgttccgagcatacttcggatgctttggtctaccactcagcatcagccgttcggtctgtgtgaggatgacgttgttctcgaataccgggtcaataaaaggttcgatgtccttctggttgccccaccgggcagagccatattcctcgccttgccgatacttcttcgcgttcttccctttgaagtagatcactgctttcagcgcagctgcgccgaccagccctaccatcaggtcgaatgggtgaaaactgggcaagacacttttgtaggctaggccaaagttcataaaaagaaccatcagcctgtccaccacggaatcgccattgcaatgacggtagagccatgcggctttttccaccatataaaaggcgatgatgtacggaaaattcagcaggatcagctttttcatatctgccgactgcatcatcctgctgaactctgcagccagctttttgccccatgccgtgccgcccgtctggttggacggtgctttgcgcggacgctgggcaggtgttttcaactttttcatcgtatcggttcctgctccctcttcttttctttcttgagctgacggtgattggaaagttcctctttcaccttttccagcttctggcgcaccgattcacgcttctgctttttcagcgtttcactggtgtactccttaaaggcggcggtcataacatccacatccttggccttgaaaaagaccagatactccgtcttgccctcctgctctacctttttcagactgtaatcaatgccatacttccgggccacccggtcgaaggacttgatattattgtccgtgacaacgatgttcgtgatttgcgcgccgctcttttgcaggctcttgatgctctgccgacctgttttcttacattggcttttttctcctttcccccgctgctttttcttgtccatctctgccaacagctttatcagggctgctttcaaaatctgcgcagtgatttttcctcctttgatgcacagtgagatggttttctcgttgacttcttcctgcaagatgctcacctcccatctatcaccgctgcatcaggggcggactgccccagccgcaggcggtgcggtatcacccagcaccgagcggaacttcttacggcactggtgcagcagatagccgcactcccatttgtgccggcaatgcttgcagggatggccactgtccgtccccggacgctggcgcatcatgcgttcaaacggattatcggtgaaattcataggcttaacctccctgttcagccagcggcagcaccccgcgccgcttcaacgtatggtaaaggaacttccggcctttctgcgtccatgccgtgtgcagcttttccacctcggaaccatcgctgcgctggagccggaacgtcaggctggacgtatagcccttgccgtggtgttccgaatacagtacccactggccgttggccaggtactggatgccgtgcaagtgcaacagccgattgaacacctttgctccacagccgtactctttggcgatctgcgtggttgtcaccagcgaattggactcgctcaactgcgcctcatagctactccggcgcggcggcttcttatgcagcaggcccagcagcgcatcccagtcaaacggctgtggatggtacgccgcaccgactgccgtatggtgcagcttgcagagcttctttgccatgtcctgcgtgatgcggtagtctttcacataccgctggaccgtgcgcccgccctcatcctgcagccggacacggggcatatactcgtagtcgcggccctcgatgaaaccatactggcacatacgcgggaaccacttgcgaaaatcactgcgaatgtgcatctggtcatacagatcacgcgcccacagcgtagagggtagcgtgtcaagactcatgaatacgatgttcatggggttgtcctcctagttcttatctactctgccgccccacccaaattcatgccgaacctgtgcggaataatagctatccacggtcacaggtgcgttatagagtgttgccagcaggtattgcttgatgttccgaatctgagtgctgttttcttttaagcactccaatatgtactggatatgcgaggaatccagcttcatcaggcggcttttcaccacctccttcggcttttcctccccgcaaatgcgcaggaacctctttctgctggtgacgatttccaccagtagttccagaatctcatgcagaaccgctttatctgccggatagccctgttccagaatttccagttccagagcctccttgaaatagcggcggtactgttcttcttcctgcaattcagccggatagataagatcagtttcactattatctgtcttatttatcttctcagtattacttccgtttgattttggaactcccggaagttcgtttttcaaactgccggaagtatgattttcatacttccagtagttcgattgcgaaagccccgcataaaggtctttcacatacagcagattgggtttgccaagtccttgtctgcgccgctcgataagccgaaactcctgttccagttcatccagcagtttaaccgccttttgtctggcacaatgaatagagtccatgacttcctctatcgtgcagataatgtaggcgttgccgtgcttgtcctgccagccgttcttgatagaaaggctcatacgatccagcagcacagcatacagcagcttagcgtccccggacatcttctggaacagatcagccttgaccagtgccttcggcacacggtaaaagctgtatcggtctgcttccagacctttgaaatacgggtactccatgtaaattcatcacccccctatcggattggatttgcactattggaaataacagtacattcctacggtggaacacgttcccatgctccaccgcagtgtatctgctgttatttgagctttgccattctgccccagcccgttcctgccccatatttcagcggcgttttctctggtaagacgcgcaggatgcacattcagtgccagaagtatctctctgggatggcttattcagttttcaaagaacttttgtgagggcttgttgtataacccttacacctatagcattctgaaaggggtgtttggcaaccactttttcaaattttctcaaaaaaaaaatttgccgcagggatttttaagtccccacggcagtttttctatattatgtataagtgcaacggatgcggtgaagcccctttttgattccctttgtcacatactgatgtgatactcccatctcagcagcaatttcccggtgcgtcattccctcaatatagtggcgacaaatcatttcccactggtgctttttcagcagttcgcttgcctttctcaaaaattctttattcaacacaaaatccataacatttatacgcggatcttccatttcattgttatactccggattcacatccgccgcatacgaaaaagtttcactttcccgtgcttcaagattacgcacaagtcgatcctctccctccagcacaagacgaatatgccattccatatcctcaaaatggttatgtggaattgtctgatgctcatttccctgcgattcatagtagtagtgtgtacagttatgaagtgcaaacaccgtatatctttcgtgtgcatggtaggaaacatatccatttttatagacgactacttccgcatggttctccatctgttttcggagaatcacttctataccatcttccaatatcttcttcaaacctggcactcgcttaaattcacttgcaataggaaccatcttcttcagttctttcaaagtaataaaattcattttaaccaccttcctgcctttcggcaacaggtgagtcttctatgaaagaacagcagaaatggcctcagacccacccgttttttttgaacggggagcctaagctccattcgattaaaattatgcctatacctatagcattctaaataagggttttggcaaccacttttttcaaaaaaatttcaaataaaaaagccgaaacaggatgaactacttgcaggcgcactactgcgctgcattcgctcattctgttccggcctatatcacatattgctacggtatcgctctaacaaacagatattatattgtagacccaaaagaacgtctggtggagctggtcggctaaccaggtgccgcctaagattccacctctgcgctttcagtgtcgatgaagcactctgcttcaggcttctttccgttggttctctgctgtgaaaaattcgatactcttcacgggaaggccgtgaatacactccaccagagattcagcagaaatataatcttcacagccaccacgcttgatctgaagcatattctttccatcaacgacactgcgattcccaatccgcagcccctttggggtgcggatttcatgttctccgttgctcatcttctcacggcctcctttgtgttggtttaagtttcttttttcttctattcaatttcaccttttgaacttccgctcttttttcacctttttcggcttgcatatttacgatttttacggtataataatccaaaagatgatagaatatagcatatattataagcaagtcgtgccgccgtgtcaagaggaaaatgtgaaaattcgttgcatctttcagattgaatattcacaaattcctttgtacattgttacagcacgataactacgccatagaaaggttgcaaacatgaaatttggagagaaagttcgcgatctacgaaagaagcattctttaacacaggacgaattggcacaatgtctgggtatcaacaaacgaacgatcatcggatgggagcgtgatggccgctaccctcgcagcattgaaatgcttgaaaagatggccgatatattccatgtacctctgacctatttacagccggatcagtctttatttatcgaacgtgccgccgaagcctacggaaaaaagggcaaaatagaagcccagcatctcgcatttgagcttactgagctatttgccagcggagagttgaccccacaggatatggacggcatcatgtatgaaatgcacaaagcctattttaagtaccgagaacaaaaacgagaaaaggaacgaataatgaacctgtgaaccactgttctattcactatgctatccccggaaggagatcacattatgtattctgcatttattcaccaagccgccaacgaacttgtccaaaatgccggaactcgcaacatcaaacagatcgcgcgcagttgcagtctggacatcagtgaaacatcccgcattaaagatatgttgggtttgctttcgctctattttgataagccattgattcttatcaacagccatcttgataaacagaccaagcagatggtgtgcggctatgcgctcggtcattatctggagcatcagctgcttatggacttgcataccctgaacaagtttctgaccattaaagataagcacatccttctttacgagcataatgctttcacatcccacctgatgctggatagtgatgaagtctatcaaatgacaaagcgcgggttggacgcggcgcagatttctgcggccaagcggattcacctcaatctggtgctggtaaaacttcttgagctgcatcatctgggatacgatctacggcactatcacgcccagcaccatgcgtttatcaaccagttcaaccttccggcacattttcagtttgatgtggccgccggatgaacttatgttcttataaccctaaaacccgtaatgaacggtgcgttatgcctgtccatcacgggtttttcgtgttatttcagttttgcgaggatttcatcggcactcatgccttcggcaagcagctttttcagaacggactctgcttctgtctttttcgcttcttctgcagctttggcatctgccttcgctttttttgcttccagagttgccacttctttttgggtcttcttcagagcagtcttcttctctttcaagtcagcctttaaagtgtcaatgttggcggtgatggatgcgatttccgctgtgagtgcttccttcgcggactgcttttccgcaatctgcgttgcaaaatcagcagtcacagttttgggcttgttcttgctaccttttgttctgggcataataaataacctccagaaaattatagtaattttagtatagcactctgataaggctgtttcaatattacgcttaataaatgcttattttctggtaggctattttcaatttacagactatatcctctatcacgaatcacatcgacaacttcggaaacatatttctgacaagtatcatgatcagaggcttccaccatcacacgcaccacaggctccgtgccggattcacgaaccagaatacggccagtatcccccagtgcttcagccacattctttaccgctgtctgcacagcctcgtcgttctgtgctgccttcttatccgttacacgaacattctccagcacctgcggataaattttcagcggtgctgccaattcgctcatcggcttctttttagccagcataacttccatcattttcaaactcgtcaggataccatcacctgtgctggcatacttggagaagatgatatgtccgctctgctcaccgccgatacgacagccgttctttgccatatactcatagacgtacttgtcgcccacagcggtcttagcataaccaatgcccttttcgtcaaaggccttatacaaaccaaagttggacataactgtggtgacaacagtattatttaacagcttaccacgttccttcatgtagcaaccgtaaatgtaaaggatatggtcgccagtgataacattgcccttttcgtccacgcacaggcagcggtcggcatccccatcgtaagcaaaaccaacatccaagcccttctccacaacaaacttctgaaggccctcgatatgggttgaacctgcattgttattgatgttcaggccattcggattattattgatgacataggtatctgcgccaagcgcatcgaacacggactttgcgatattccaggagctaccattggcgcaatccaaaccgaccttgacacccttaaaggagtagatgcccagcgagatcaggtagcccatgtagcggttgcgacctgccacatagtccacagtgcagccgatgtgctcacgatgagcaaagggcaactctggccagtccttatcaaagacatggagtttgccatcaatgtagtcctccaccagcagcagagtttcctcaggcattttctctccgtagcagtcgattagcttgatgccattgtcgtagtacggattgtgactggcggagatcataatgccgcaatcaaagtcatccacgcgagcgatgtacgccacagatggagtagtggtaacatggagcaaataggcatctgcaccagaagcggtcagaccagccacaaggctgtactcgaacatgtacgagctgcggcgggtatccttaccaataacaatacgagcagggtcggtgtcaccgttgcgctcacggagaccattataataccagcctaagaagcgaccaaccttataggcgtgatccgctgttaatgtaattccggcttctccacggaagccgtcggttccaaagtattttgacattgttagttttcctttacttttttctttcccaccatccatggagcaagtcttacaacaacctcatatgccgtactgcatattgccatcgtaataactaccactaccatggccagtagaaaattttctctcactgcatctgtacccagattcaacagaattgatacaatttttaccacaattcgatacacagggccgtgaatacaaagaataattagagaaatccgaccaaagtattgcaggattctattctcgttgataagttgagaaatcagaattacagcagcaacaccaatcatggctgttacaaaccacatgattcccatagttaaatgatagcatgataaggaaaagctcaaagcaagcagaactatcgctactattcctgctttcacttttttctttaccgctttcacgcttttccccgctatgaacacacccacagcatagaatcctatgtacttgaatacacgatcaatgccccaaataagtccatgcattggaaccacaataaaagctaaactcattagagcagaaacaagataagccattctccttccgcctagattaaccagtatattaaaaaggattaccgttacaaagaaacatggtaagaaccacaaatggatgttgaactccaaattatcataacagccagagaataaaccgaacaaagaatccataaaactcatatctgaatcccggaatcttctctccatcaattgccagtagataagaaccagaaaaccgaatgagaaatacggaataacaatggtttggattcttcgctttatgtctgctaaaactgttttttctttatacacccatcctgctgccaagaaaaacagcggcatatggaaggaatacaaccaattaaagatggtttgattggaatagatatgccctataacaacaaggattatgcctatcccttttaacacgtcaagccatgataaacgctctgctctgctctgctctgctctgctctgctctgctctgctctgctctgctctgctctgctctgctctgctctgctctcaagattgtgtcatctcccaactctttgtcaatatgaaagtttatcttctaattccaactttagacaaaataatcttgatttcatttttcaaatattctttcggtagtattttcttcatagcaaaatcaaaacccttttctaagttttcaaagaaaaacattcttgatgatggaattctcgatggatattccaattgatgatttaattggatcgctcttgtaatatccgcatcaaatagttccacatttgacttttttagtaattcttctccctttttcgtttgacagagaactaaagatattccctttttcttttcctcttcagacaattcacttccccatgaatcacctaatgaaatatctgaaacacgagattgtgacgcataacgacaggaataacaattctcagtataatcaatacttttcaggaaagcatatgtatacatatcaacaatccgcggaaaaccattatttttccctactgatcttaagccaaatgatgttttctcacggaaattcaacccttctaattcttcgatatccactgatttttcttttaaatacatcttcaacaattcaggtgaaggggacccgtggcatattaaatccactgtatacaaattatcttgattgcgtgagaaatttttcaatgccgcaacttgacatggcaatccaacaaaaaggacttttttcccttcttgtagtttcctttcaatatctatatatattgtttttggattacttttaacatatttagatcctacaaattgctcagccctttgggtcgaatttgtcaattcaaaaacaaattctcccttattaagcatacacgaagcaacatatccaccatttttaataaatgaatatataattgatgaagcaattcctcctgaagatgcattacttctgatttcaggattcaatgcccatccttctttccaaaagatagggttaacctgctccacgcattttacattaggacaaattttttcacacaacccacaattcacgcactttacttcatcaattacggcattatatgtcttgtaatcatctacaatagtaatagcactctttttgcacatatttatgcaagccatacaaccagcacacatatccttagcgcacacggttttcatgcaaaagcacctcccgtgataggcacaagaatatacgctgttttctctattataacattatttcttatacccccccccnnnnnnnnnnnnnnnnnnnnnnnnnnnnnnnnnnnnnnnnnnnnnnnnnnnnnnnnnnnnnnnnnnnnnnnnnnnnnnnnnnnnnnnnnnnnnnnnnnnnnnnnnnnnnnnnnnnnnnnnnnnnnnnnnnnnnnnnnnnnnnnnnnnnnnnnnnnnnnnaccacataatttttttcttaatacttttttccatttttaatggcaaaaatatgtttttcctaaggttagaaacacactccttatacgtttcattatattctaaaatcatattagatcgaacaaggccatcaattatacttctattgaaacaatacctgtgatattcccatgctttctcaatatcaatattcttttttatccatgcttccttttgcaattccaaagatttgattccacacaagttactctttaaattgaattttctcatcgcactatcaggattaaaagtttgatggtaaactgcgctttcaccaactgccacactgtttacatgttgtagaaactcaacattaaaaagcattccttcaccataccaaattttttcattaaattttatataattctcttcgagcacactccttcgatacatcttattccaaactgctacaaaaagatctcccaaataaatccactcaatagctttttccgcactaatcacagaaaaattattttttgatatatcattgcaacctgaataattattcttattcatcacaacatcgcagcttgatttctctagtaaatcaacaaaatatgtcacatagttagcatcaacccaatcatctccatcgacaaaggtgatatactcacctgaagcgacagccattcctgcatttctagcactagaaacgccatgattttcctgatgtattacaactattcgattgtcttcctctttcagtctatcaatgatataaccacttttatcaggagaaccatcgtcaacaagaattacttctatatttccataatcttgttttaataatgatctaacacacttatcaatatacttttcaacattatatactggaacaataatgctaaccaacttctgcattagctcacccgcttcctttgaattttatttagaaaaaactgtaacatcggaatccaagttttggaaaacaccgtaaatccaatcaaaagaatcacaagttgaagaaggaatcctttcattccatctacaaacattaaaattgcagacacaagcattaataacgaacctaaaatgaattccttatacataatatcatacttaatatattttctagtgtggaacacacggaacataaaaacagcaatataacttatacatgttgctaatgcagcaccatagactcctatcactggaatcaagataaaattcaatagtatattaaacgctgcgccaaacgatccagaaaacaaatagccaaaactatccttatgtacagtataacttgttgccatgaaggtgcccaatgttaaataaacacatccaataatcaaaaacggagtatatttccaagcgtcataataactatcagccacataaactcccaagaatggttttgttaatagcaaaaggccaattcccatcataaacgcaattgcagaaagtgttttgaacattttattgttgtattcagtttcatcactcgtgccctcttcacgaatcgcagaataactccatgcttgattaaatattcctgtcagtgttgatacaagggtgggaagtttataagaaacagcatagattccgttagccgctgcaccaatcatgtaggtcaccataactctatctgaagaattcatgatccaccacataaatgtgttcgggataagaacaaccgaataccgaatcatctctttgagtttgcaacgatctatgttgtgaaacgagaacgctttatatccttttcctgcaataatggcataaatcgcaactataaagtttgcaatgatatatgccaataaatatccacctgtttccatcttaaagacaagtaaaaatgttatatttaaaatcgctatcatcaatgtctgaaggatatttccaagtgaatacttaagtaacaattcctttccgcgtaaatcgcatagaaacagttgactagcagataaagaaatgacataaaaataaacatacatcgcatagtcagatacttctgtgatgcatctgcatattggaattaaaaccagtccaattatcatcgcaataagtagaactatgcttccacactgtgtgtttttttccttatctgcatctttgtctaacccgaaccgcataaccgactcagcaatattcaatgtaagcattggccctgcaactgtactaatagtagttataagatccaccgtaccatactgactcgttgttaaaacattagtatacaatggaatcaagaaaaaagaaatcatcctagagccaatattgccaagtgtaaaaatcaatgtgttttttaataagtatctatttcttgactcactacccattttaaatattttcctttaaatacaacgttgtttttttacgctcttgttcaattatttgattagttttataaaaatcaacttcggtattatataatcgctcaatatcctctagtttttccacttttctatccaatttatcaagtttattaagtaatgcttctaatttattgcgatttgaatctcttaccagagtacaaaattttgtattcattttaatagagaagactgtaccatgaaatgtatccgtaatgacataatctgcatttttgaaataggaaaatacatacaacggattgcaaattatatttttatccgcaatatttgaataatgtccaacacatataatcctcttattgtgcctttttgcaaatttttttatatagttttcttcttctctgcttaatctgcccgtgtatgcatataaaatgatataatctctttcataagtcgtatactctgcaatttcttgtgtaaaatcatacatcagaactggatccatatgaatttccggagagtaaccgagcaattgcctaacaatatgagcactattttcatcacgcacagaaatagctgcaaatcttgacagcattgttttaatttcgtgtgcaattcctgtatctaccaaatcttcataacgtgtgcttccaaaagaagccgcatatgaaacaatcttggagtgtgcatatccatctccaaataactgcttagaatatcctactggatatggttgaaggcaattaaatacttcatcacttccaatcactaacgtgtcaacctcacagtcataattcagtttatcaaccccaatattctttaaatccaggattaaatttctttctatttctttgaaaaagttcttttttttcagataattccatggggttctgtttttcagaatcttatccactatgctttcagctttagactgcggtttttttaatctatttgtaatatcaacaccaaatctgtaatctataaattcaacttctgattttgaaaccgactcaatcatttttttcaaaccatacgcttgcaaaaaagatccataattaataatcctttgcatagacataataccgatttttttatccatctactcgtttctcctctatctcataaatatatacggtactgtttgatgcgcaccaacaaatacaaaatagtaccaccaataaaacatataatatcctatgattaacggtcgaataattattccgctttttcttggttttaatgcactcattgcctgtgatatgacaagcacctcaaaaatcgcaaagtataaagcaattcttccaccatacccgctcacactggtaaactgtgaaaacaagactgcatatacctccataaccaagaaaaatgaaatgtcttctccatcttttctcaaatatctataactccagatgatcaatattatttgaggaatacggattaaaagctggtttggcataaaaaccaattttcctgtaacgtagctgacatattccccaaatccaacagccgacaaagcagacacaatcgctgacatcataatcatcactacgaaaccaatccccatagatatcagcattctaggagtttcatttctcttactaacattgtttcctgttatgctcaaagttgttcctttgacaatataatcatacagaagataaatcagtaatatcagcaatgagcttgtgtggaataagaaagcaataatcacacagataaacgcatttttcttttctgcatttttccaatattcaaatcccaggactcctaaagacatagcgattgactgacgcatcatattcatcgagggattataaaatgccatgcaaaagacaaacatcgccatcccaaggcttgtgttcttatcttttctaacggcaacatatagtggcagaatcacacataattccagtatagtttgaacgcaatataatgaacctgtaatttttgttacaatcaaaactaataacggaaacaatggttccatatccttcacataatctgttgtccatgtgaaagcatggaaagatgagttcaaatactcaccaatgctatggcttcttttcgctgcctcataaacaggcattaaataaactcgtgtatctgttccaacacccaccgctctcattcctgctaacaaacacaatgccataactgatatgaatacaatcggtttcctttgtgtatatttcacccgatcagaaagcgcaaaaagacctatcgaaatcataaatacaacaatatatggtgtcatctctttttgcctcccctctttacaccttccacttcctgtttctcgcaacgacaaccttaagtgctattctatttccaaataatgatatcgcagcaaaagcccgtaatctctttggggcattaccatcttttagcacatttattcgatgtgctttcaagatgctctgaatacgcttattccggaattctaaaggctgtggatttcttgctgcaatatcatatatgacatttatatattgagtcgataatgcattatcaaactgcgtttttccttttaccgctccggcgatatcatcaacagcatctaaagcttctaaatgcttttccttataacctgagacaactatacttccttcatcccggtaatagtagaaatagccatcaaattctacataagttacgctcttactcttcaagattgttttatagattgtaaaaagatcttcagagaatttaccatatggaaattccacacccttaaataggtttctcttaaaaagtttaccacacgcagatgtgccaaatggtataccatatagcatactaatcaaagcatcttcggatttaaaattagacgttttccaagctgttgaagtgtttttctcatctcgcttactcgttctcttcatatttgcaatagctatgtcggatttattctctaacatagcttcaaagagaatttctataaagtcttttgaaatgtaatcatcactgtcaacaaaagtgattaaatcccctgtcgcaaccttcatacctgcatttctggcatcagacagaccaccatttttcttgtgaacaaccttaatcctcgtatccattttctcataatcatcacacattttcccgcatgaatccggagactcatcgtccactaaaattacctcgatattcttatatgtttgaaaaagaatcgaatcaacacattctttcagataagattcaacattatatattggtacaacaacactaaccagcgacgtcacatctttattcttcatattttctgtcattgcttaatacttcctgatatatgttcttcatggcggcaatagatttagatacatcaaattcttctgccttttttttgcaagcagctgccatctggttccttgcttccggagtcaggtttacgatattttcaatagcttctgcaaactgatgtgcatcgtacggatcacaaagatatcctgtttttcccggaattacatattctcttatcccctgcacatcagatcccacaacaggtacacctgatgcaagtgcctccactcccgtcattccaaatccttctcttacggatggaataacagcaacatccgcacatgcatttatctctggaatatcaagtctatgtcctgccaagaaaatcctgactcctaatctggaggctgtttctttgagttcttcctcgattgttgaattaacaactgctgttccgcagattacaaatatgtactgttcttttctatcaagcgttcctaaggcttctataataattttctggttttttctcgatgacaattcacccacagctaaaaccatatgatcttttgagtttacgccaaatgatgctctatactcatctctgttaattcttaaatttgcaaacctatgattatctaagccaacgctcggaataacataaaccttggggcaatgcattttttttgcattaccatagtcctcatgatttatcgtaataatagcatcacaaaatcttgacattagcttttcagctgtaaaataaacaatccaactcttttttgatgatctgtctgtgaatgcaaatccatgtgtggtatatataactgttgttccagcttttctatatttccttgcagccattctggttaaaatgccaacaataggtgtatgacaatgaatcaaatcatacttattcgttttcaaaataagttttaattgtttataagcctgaatattttgagttgacaccgggctttttgtatcaaattctacctgataatgtgcaatccccatttcttccagtttaggaatttcaatcaggttagggcctgccgcagaattttcattcattgccactgacacttcatatcccatttcttgaagtgtcgcgatatcattccacagaaaatgtagaaaaccagcaagattcacaactatcaatgctttctttttcatccgttctccttatgctgtttcccatttattagttcttcgtaaattttgcagagtttctctatatagttttccgcatcgcatcgcttttttgcatacgctactatgcgcgcgctcatatttctatactcggtttctgtcaagtttaaagctttctgaatagctattgcaaagctatcaggatttcccggttctgccagatatccagtttcaccatcttgtacaatttcagaaagacctgcaatatcacttgcaacaacaatcttccctttagccaaggcctgtaatgcaacaaatgccccattttcataccattctgacggtacaagaacaactttggcgcgttcaattatacgatccatttcttcgccgaaaattgcaccgtttacttgaacgcgaccctcaagattgtgttccttaacaaaattttttattctttcttcttccgatcccttaccaaccagaaccaatttttcatcacaatgcatcttggcatatgcctttaaaattgtcaaaacgcctttttctcttgcatatcttccaaaatacagaatataattgtcatgctcataataggctttgtactcctgatttatcggcaagaaattattcatcttgattattggtgaatgtgtaaaatgagctttttctactaaatttttataaaaattgcattccgcaatatataagtcaattttgtcataataatgcccatatctaagaaattgagcttctatatatgccaatacactctttgcaagagagcctttcatgcacttatttttcacacaattccaatatccttttgtcgcacaatcactgcatatagttccgtcttgtcgcagcatcgtataacaaggacacactgctgtcaattcatgcaagtgcatcacaaccggaatgttatatttcttcaaaacatcaactaccgaaaatgtaatttggcgatgcaacaatccaatatgggcaatgtctggcttttcatcccgaattagtttttcgatgttatgtttagattcaaaagaatatattaatttaattcccattttgattttcttaaatgtactcaaattgggatcattataatctacatttgaaacaaaatatttatcttgcgcacacggtatatttctttcatcatacattgaaaagaaaatgacttcatgccctgctgcagttaacgcctctgccaaattataatgaaatgtttctgttccacccaacatataatggaacttatgtattaatagtattttcatgttgctattcctctctttggaccaatttttcttttaacagagaaaaagaatcataatgtaggtctttatctgcaataattggcatctcattttcttttataggccaatttatcttcagctctggatcattccacggtattccaatctcatcattcggatgccaatagtcagaaaccttaaaacacacctctgcaatatcagaaatcacataaaatccatgtgcaaaaccttctggtatataaaattgttttttattatctgctgagagttcaacaccataccaatctccgtaggttgaagaagtagtccttgtgtctacagcgacatcgtatatttttcctcttacaactctcaccaatttcccttgcgggaagttcttttgaacatgtaatcctcgcagaacgcccttaacactcatcgactggttttcctgaacaaaagtcatatttaagctatttttaagtagttcttgactgttatatgtttccacaattaaatcttcatcacttttatatgacgctggatttacaacgtacagcccttgtattcctgttttttcaatcgacaaatgttgatccatattctcaattctcaccttaattcatctaatttgtttattgcttttctataaattgttaatcccattaccaataacatcaccaacagtaaataagttgtcatatatctgataactggactttcaattctctccataatacctattttctctacaattctaaagacaaccatgtgagataaatacatctccatgcttaaattgctaatataatttgtaaatttattattcatcaacctattgtcatatcccaaagctaaacccagccatccagtataaagtatcaaggttttaataaccactatattgatagaatttattacgtcaggggtaatgtaatagcctaccgtcaaagctaacacaacacaaagactaattactttaaattgatttacaaaacgttcaatttcatctttatacaaatatacaatcccacctatgagaaaatatggcaagcaatacaaaaatgaatgacgcatcacaaaattttccgtaacaaatctttctgtcataaaatagcactggcacatatatgtaattaccaaggatatcacaaaggacactattcccctttttggactatagagaaggaaaacaataaacggaaatataatgtaaaatgcaaatatagcaccaagtgtccatgcaactccgattgtacttaacgtattgtttggcaaaaaaccaaacagcattgttatctccattaagccttcgcatactgtctttggagtgaattcgataacacaatttaaaagtatcagcagtgcaaaaaagggaactgttctcttgtacctttttgaataaaacgcgtctatactataagttcctgtttttaacttttgataatatccgttgcacatcccaaaaccgctgattatcatgaatagataaactagatagtcaaaggatggtataaccttgtctagtacccccccccgtactaaatccggtatttgctttaacatgccaagctataattgccagacatccaaatgttctaagagcatcaatgtttctatattttcttgtatcacccattgtttattttccccacaaatacattttcatactgtccgcagatcttatcccatgtgtactcttctgccacacgcttcttagctctccggcccatctctgcaatttcatctgcactcattcggtctgccttatcaatcaactttgcaaggctacccggcttgcggctccaataaagagcacaatcctctgcgacttctttattaaagccaacatcaactagcaggtttaaatctgtactgccgagagcttcaatcagagacgggttcgtaccaccaaccgtatgaccgtggaaataagcataggcattctcacgaatcttcttcagcagttcctgatcgtaaacagtgccgacaaatttgattctcttatcactcttgaaatgaagtttttcctcaagctcatttaagaacttttcattcacattcgtaataatcgcaaagttctttttgctcttgcttttcatgaactcccgaatcataacttcaaaagagttctccggtacaaaacgaccgacgacaaggtagtagtcctttttcgtcagtcctttttctctataccagttcatcagcttctcatcgtcatcagccaacttactaagggtcagatctgcaccgtacgcaatgaaggttgttttcggactacttccttggatgcccttaccgtcatagcattcatggatatacttttcgatattcacagagtcacagatagcaaggtcgcaatatttgaccatcatctgctcagaaatcttccaatacttccgaattggtgccgaccattttgccctcatccactcatgtccatccgggttcagatacacagttccacccagtttatggatttctctgtaaaaatgactagcaaaaggcccaatgcggcaagccatgatgtaaacaatcggatgcgggatatggtttttcttgatatgttcgcaacaagcctttagtgcagcaacatcataataaattgcctgcgcaggcccaatctgaggaacatcaattttgaagcagtgggcattgtggaattcaaattcgtggtcgttgatttttgtcacgccatcaaatttgctctcatccatgcagccatcgccattggctttgcaggcaacatgatatttgatgttttctttattctggtgatactctgtgagcttgtagacaaaggtctcataacctccgtaagcccccaatgacttcgcgccgacaaggtatacgtgctgcacttctttttttgaattcattcctctattccatcctcacattttatcgctaatgttgcatctattcccttatggataaaaacaaacctacggcgggtcgcacaaaggcaatccaccgtaggcttgaactctccttcaatctttatttgctgctcctttttgtgggtcaaaacagagcttccaaaagcctcctacatataaccccggattttccgtatcttgcagtcttttcaacaaataaaacttttgaaggacaactcaagccttgaaaaccctttagttatcgtagtttttcttggttgaccctattatatctctagccccttttttctctatcgttggaacgtatttctgtcggattccctcatagttcgtgttatcgatatcgtcatactctgcaccgcttacatgatgccttgaccggttgtagcaggtcacctgacagccttgctgtgccatccgcgtgcacagctcctttacaacgatttctacgccgccctctctcgacaatcgcttttgcccaaataccgcaattctaaggtttctctccatctcgtctctccaaccgtattccttccatgtactatttcttactccccacgccccaacaaacacaccttaaacgtcttaaaaataatcttccaatccacccagaagctgcgctccttgacgtatttcacgtccagatccatccactcctcaaaagagaggtcattgcggtgcggggcgatctgccaatagcagctcaggccgggggtcacatacaaccgctgcttttcatagtcgccgtactgctcgacctcgcggggaagcgccgggcgggggccaacgatgctcatatcgcccttcaggatattccacagctgcggcagctcatcaatactggtcttgcggataaacttgcccacacgggtaatgcgggggtcgtccttgatcttgaacacgggaccatccatctcgttttgatccagcagatcgtccaactttgcctctgcattggggcacatagagcggaacttatagaacttgaagggcttgccgttgcggccgatacgctcctgactgaaaacaggacctgcagacgggtcatccaccacaattgcgatagccgtagccagcatgaccggcgacagtaccaccagtgccagcgatgacaggatcacgtcctgcgtccgacgtccgatccagtacaggcgatggtcgcgcagattttccttgcggttaacttcaacttccttatcgattccaacagtattcgtagccattttttctcctcacataaatccttgtctatgcacttcttatcgtcattcgttttatcgcaatttccagaaatagtgctctatcaacacggcatatttgcgatatgcagtttgcggatgctgcttgcgcattaaaaacacaaactgctataaagtaatccctttaactcacaccgttcccgcaagcaccttccttttagatagccgttcctcttttcctaaaaccggcagaccgttattcccgatctccgggcaagcaaaagccctcggacgacagcttcgcccaaggtcatttcaaatgcaatgtggccgtaatgaaaaccagaacgtcatgctacagctcaagcgccgcatgcgcattgattccagtatgcaatatttcacatttttgtagaacctcaacaagcccacttcattttcacctttgcgcatcacgccagcaagggaaacagcagtgggctttttattttgatctatcattcgggtttcctcataatctatcacatgattgttcgcaaacagacataagcccactggattcacctccttaccgcaatcaaggcgtatccttccatctcaaaacggaagataccagttcttctacgtggccgtctgaattctttttctattctatcatggttatatctgggaatcaatagaaatccgaggaaatgtatccatccatgttttagaaaaaaatgcgattcagccagaacttttttgcacattgcccagtttcgcatgaaaactccagatgaaatcatcgatggacaaaatgtgtggtcatatagctgtccaaggcgtcggagattacagtcaggtgtgatagcaaccccgatgtaatgacaaccgttaaatagagagtgtctcctcgcgcggaaaagccggttcatgccgtcacatcagtcaggagctctgacgaggtatatcgcacagtactacataatttttatcctctcccctgctgcccctatttatatataggtacaatcagcatcccgtcactgcagctaccacctgctctgggtcaggctattttttacgctaaaaagcccctaccaatcacatttctgtgaaaggcagaggccttctgctgctagattttaatcaggtctggggagatggaacaactatctcattctaccgagtcagcgtccccttccagatttttaactacccccggggtgtctgacgcactgagcatctgttcttgctccatgcggcggcgtacagcttccaccacataggcgtttacgctttgcccagcttgctttgctgcttgtttgatgcgttctttttcgcccttttgcgtcacgagctgtgtgtactcgtaattctcgttattccatttccgtttgctggctgtacttgttttgccgcccatccaaagcaccaactttctgtttactcttataggtattatatcatatcttttcgagctgtccattctgcaaatacttcatggagtatgcattttccacaatttatagccttttttcttgtgcaacattccatcttgcgtacttcatggagtaggcgtatactagtgccatcgggaacaccggttctcacatccgaccattcaccaacaatttgaagagaggtacacacatgagtatcaacgttttactgacccttgtcgagcagtacaaggaggccgcccaactgattgaagccgcacaggctgaacaggaacagctgaagatccagatccgcgaggcactggctgagcgctccaccaactatctggaagtaggctgccacaaagtccgcctgtccgatttctccagcacccgactggacagcaaagccatcaaggccgtagctcccgacctgtacgaccagtacagcaaaacggtcaccggcacccgcctgagcatcacctgaaaaagaaaagccccatacagcgcctaccgaccaaagctgacgttgtatagagcccaacacacccgccggggcgggctacaccaatattatacctgtcccggccttttttatcaagaggaaggaccgaaaaatcatgaaacagactgtcaaaacctcccgcgctgctggtcagctggaaaagatgttccgcgaactcaacaagcactactttgcaggcaagctgcccgagcccatcatcagcctgaaaaagaccctgtccgcgtatggtcatatcacctgctccaaggtctggcaggcaggcggtgagaacaagtacgagatcaatatttcgtcggctacccttgaccgtcctatcgaggagaccgcttccacgctactgcatgagatggtgcacgagtactgcatggagaccggcatcaaggacaccagcaacaacggggtctaccacaacggcaagtttaaggcacaggcagaagcacacggcttgactgtcgaccaccacgaaaagtacggctggaccatcacgagcccgtccgaagagctgctggacttcatcatcttccaaggctggcaggacatccagatgggtgagcggctggcatggtcagatatggcaggcaccggagcaggcagcaaggcacccggcagcagtcagaccggcgcaccgaaacctcccaaggcaaagagcagcacccggcggtgggtatgccccaagtgcggaaccatcatccggagcaccaaggaagtgcgggtcatctgcgcggactgcatggagctgttcgtgaaggctgactaatcacagcaggacagagagcgagggcacgagtgagagtagtgctatatataaaaacaggaggctcctcatggatacttataaaatcgctattgacacctttcttgccgagacatccgagtgcaaagccagtgggtgcgccgttttttccggggcagacatcgcgttccaagacatccagctgcacacgcaccggaacaagtcagagctgcatttcatggccggacacaccatgctttccatcccccttgccagcatcctgagtattgaaaagctggtattgcgagatatccagtccaccgagtatgagatcatcaccaaagagagcggcaccattacccttgacgttgtttaaaaatgcacccgtaaagacagagattcgccgggctgtgagaggacgcccattatattgaaggagagcagccatgaccattatatcagaacgtttgcagcatctgcgcctgacgcacggctatactcagaccgagcttgcccgaaccatgggtgtgagccgccgggcagtctacgcatgggagcacgacaaatgccccgagatccctcatctgatccagcttgcccaattctatcaggtgtcgaccgattatctgttagggctgaccgagtgaggtgtccccgccaccggaggccttaccggatactttttgcctgctatagtgcggtcaactatcagtccgcgcgacggcagccacaatgctccatatttttaaaagtgcacttgtaagtccatcttatcggacgcaccgtttggtagacttcaggtacagcaaaagcaaacacacttcaaaatacaggaggaaactattatggcaggcgctttttcgttatttttaggtatgctgggtcttggtgcggctggtgcagtcagcgcgggacagaacgcaaaaatcaagaaggcagactatcagtatggcgaggagcatggccttcatggcacctctgaggttctgcaaatgcgggagcgagtgcgtaaagaatggtggaacatctgcggcaaaacctacaacgcatgtgagcggcctgcatcaagttacggcgacctcagcagaaccccgtggtgctatctgaaaaagcgctggttcattgatcatctgaataaaaagggtatcccttatgatgatctggttgtgaacgatgttaccggcgttaccttctacgagagccagaaaaggacgtcacaagcatatatgagaaagctgcggtaatagacatcgcgcccatcgtcaccacttctatcagcagcaggaggtaagcttatggctgaaaataaaatcttggtgcaaattatcgatcatgcgaacggagattccgtgctggggcaagattactttgaatcaagagaaaaagcagaagaattcaaacggatctcagaccgcgcgtatggcaaacttcttggtgaaggtcaaaccagaattaccactgcgttcattgaacgctgacaccaaccatcatttcctataacagcaacagagctctgccgctcaaacacgagtagcagggctcctttttatgcggtattcggtcaagaagtgaacttaaagagctgcgtttaatatcagacagcagatatcccggcggatttgcggctcgattattgttttcaccacttttgagcatatccatttgcgtcgtgaaatgcgacggaattatgagcggactttgattccagtcataaggtctgtcaaacacatctccacttgtggcgaaagtccagaattgaaccacggcgcacatttttgagcaccgtctacatctccccaaaattggggacacctctcttgatggggtcagtctaagtgacctcactccaatttagaccgttgccggtgcgtactgtttggcacaggttctcatacggcaatcccatcagcgaacaaagcatatcttgatccattgagctcgactttcaatttgaaagttgaggtcggaaaccacacgcagaccgccttgatccgctttcaactttggtcaaactgaccactgttgagggaggaatcacgaaggtacgtaaaacaacggtgtacaatatgcgtggcgtcatggaaatctgccatctgtcacgagcgcaacaaagacagtcttgataagttttcaatgggatttcaaattgaaaccgcctccttgagtcatgtttcagggtggtcgtggaatgcgactcccttttgacagcccaaaattcagccacgaaaggatgtccaccacgtaggcagccttatatcagtcaacactaacgcgccgtatttcgattgaaattcattttttaattgtgtcaacccagataagacaacagcttgtgataccatccgccgggcagacgcttactaaaatataagtaatcgacgaattgacgtatctcctatacatttccagacagcgccacacttcacttgtttgcatcaattacttgaggcatttcactatgatcgaatcaatgccattttttgctatgcgtcctattagtgacgtattgataaagaggaaggtattcgctggcgctcataccatttagatcaactccaatcttgaaaaagctcacaggttcgcttagtcaagatttccgttggcgtgatcatgttaaccgagcgtttctgtcccgtcctcatgcttcggccgttcaagaagcactcggctaacacaaccacgcaaaaaatcaaataaagaagtcgaatacagagcgacatcagtgcctatatttttcactctattatatactatagtgaatttcgtaggcatcaattctctaattttgtcacccaccagaccattttcttttgtcctgcttcaaatcgcttctgcttacttccaagatcatatccatattgctgcaaccattgacgcgcaaaggtatagcttggcaacgatttttcagcgtgtccatctgccttgttgtagatgtgccccagctcaaagaagatcttctgccagtcttgatagtagcgttcctcattcagatggtcatccagatactcaagcagtggcggcggttcaaggcgttctacttttgcaagcaggctttcatcgatctttttcagcagctctgtctgatacccctgttcaagcatttgcagcaggaaaacacgttccacacgagcctgcaaggtcgcacgtttccgccagcagtattcaccttcccgtggatccagaacgactgtatggctttttttcagtatttccactgtttcaggcttatgcaggtatgtcttccatgccttcctatcatcaaaccatttccgatatgcctcgaccggttccagctgatacttctcgatttttttaagttccccttccagacgttctttggggtaatgcagcaaatacaccgcgcaggtatccccctcatccaagggacgtttgcggccaaggatctgtgcattaacgagcgggttccacagttcactgacaatatatttcagcgcacggtctttcatatccacaccattatagagggtcgttgtggtcagtgtgacctgatgctgcagaacattgcccacaagcacatcatccagtttgtcaaattcctccgcttcctgacggtatttggagcacaggcacgccacatcctctatgccttctgccttcagactgtcccgcagttttcgcagcttggcgatggtattcacaaaaacgaggatcttttctcccggctgtacccggcggatgatatccagttcgtcatcgtcacggtagaagaacttcacgcttgacacaaaccgataatccatcggcagacgatagtgctgtcccttcgggatcatattccgcagctcccaatagtcaaagaaggggcgggcggtagcgctcataaagatgcaggtcttcgttgtccacagctctttaatagcctcatagcttgcatccacatgatcgttgaagctggcatctgttaccatgtagtgatactcgtctgacacgatataatcaaacgatctcagataagttttagcggcatcttcattcctttgcaggaaggtttccagccactggtatgtttcaacacggatggtgtgctcatacttgttatctatggcggttttgtcaacaattcctccaagcgcgggatcatagtcctcgtaggatacctctatactccccaaacggttcacatcgcgctcgatctggttgcgcagagcttcgcgattgcacaggatcaggatacgcttacgatgttcatatgcccacggcagcaatgtcttcagaataaaataggtcttgccggagttcgtacccgcatcaaacaccacgatcccatgccagttcttgtaatcctcgccaacaagatctgtgatgtactgttttgcaggctgtggagttgccccggcggtttccggttcttcctccggcacaatgggatcaagctgttcgtctgccacctttttctttttgcgagaggccttaatacaatccagaatctcctgcaatttttgctgtcgttcttcttccgtcaacgaggcagggtcaatgtgctgctcctgctcatactcccgttgtgcctcagccagcttcaggtagaaaccatcgaatggccagcgcttctcttcatcactcatattgatccgcgtctccttttttgatttcactataccatatcatctcgttctgctcaagggatgttggcccattttcactttctctcccccttccccatcttgatcttatctccgtggcgattttggcgggtcagctgctctaggggattcagggcgtcatagttggctctcaggtcgtccgcatacagtgccacataccgccgggtcatggtaaggtctgcgtgtcccagcagcttttgcagacggaacgggtcgccgccagcttggatatacagcttcgcataagtgtgccggaacaggtgcatagaggtcttgtccacgcctctgctatgattataattccaaatcgcattaccgagcgaattcagggtcatctggttgccatactccgagacaaacaacggggctgtagggtcgctggtacgatgctccagatactcctccatgatcttgactagtgccttagagagcggcacgatttgctgattacgcgccttcatgtggcggaaaaacactgtcccggcggaaaggtccaaatctccgatctgcaggttgagcagcgtggacgcacggcagccggtaccaagcaggaagttgacaatgacccagttgcggtattcagcaaaggagcaggtcttgcagtccggttccttcagcagcttctgcaattcgtcggtggtgtagggttccttgatcggatcatcggcacgcaccagtctgatcggatacttttccagatagcctttttccatgcaccagtacaagaacgcacgcaccatgcggaggttcgtattgatggtcgtatcgtggagctgttggtccttcatatagaagatatagtcctccaccgtttcctctgtgatggtatgaataggctgctctgtatcccccagaaaccgaaagaaacttctgccctttgcggcgtagaagtcgagcgagccttgggagaggttcttgagccggttgtacttttggaacctttcaaaggcctgttggatagtggggtttgccttggcagcgggtcttaaatcacggttatgcacgagagagactcctccttttttcgcgaaaaatccctctcgcccgctcaacacttccagaaaatggaacgaaaagaaaaagcccagaatcattcgaatcaacgaacaattccgagcttctacatgccgccgacgggggtcgaacccgtactctgtctccagaaagggattttaagtccctcgtgtctgccaatttcaccacagcggcgcagccccggcttacaaagtcctgctgccctctggcttgagagggagccgggaataacaggtgtgaggaaaaattaatacaaccacactgctattcgcaatctggtggtattaacatttttattaaatcagcggcttttatgatacaatagtttccctgttttgtcaagaaaaaccgcttattcggtgctgcttacaccttgcctccgtgcagctcggcgtacatccgggagcggcactcggccactgcgggggtcatgttgacgtagtgtttgtgggggcactccagacgcagctcgctctcccaagtctcctcggtgagctgctttgcaatataggccttcttttctgcaatagagggcagttcaatggccagctcgccgcccagaatatgcggcaccagcagcgggcgcacagcggtggggataaaggtgatggtgcgctcgatggcgtccgaatccagattgaccatagtgaccggcttaccggcctcgataacctcgccgtccatagcgatcaagtcgcactgtgcctgaccgttttcatcgtacagacgccacggcatcttcttgcccgggatgatagccttgctggcggagtccgagcacttcatcttgggggtgtagctgccgtccggcttcttcaccgccaccagcttgtatacgccgccgaacacggggtcggaggcagaggtgatgaggttctcgcccacgccgtaggagtcgaagtgtgcgtgctcgtacagttccatgttggcgattttcttctcatccagaccgttggaggccaccagcttgatgtagggcttaccggcggcatccagtgccttgcgcagccgtttggagccgcgggcaaggtcgccggaatcgatgcgggcgctcttgacgcggcggttgggatcgttggggtatttctcaatgagataatcgtccagcttgatcaggttgggcagaccgctttccataatattataggtatccagcagcagactgaccgaatccgggtaggtatcggcaaaggccttgaaggcatcgaactcggtggggaaaaactcgataaagctgtgtgccacggtgcccacggccttgacctctgcaccgaacttcatctcagccagacagttggccgtaccgatacagccacccagcactgctgcgtaagcgccatcgttaccggcgctctcgccctgtgcgcgacgggtaccgaattccatgacgttgcggggggtgtgggtgttcagaccggtaacgcgggtggccttggtggcgatcaggctatggaagttcatggtctgcagcaggtaggtctcgatcaggatcgcgcccaccagatcgcactcgatgcgcaccatctgcacatgggggtagcagaccgtgccctcgggcagggcgtacatatcacccttccacttgtaggtgcgcagatactcgcagaactcctcgctcatgcccttggtgcgcagccagtggatatcctgctcattgaagtgatattccagcaaaaagcgggtcaatttgcgctggcctgcgctgatggaatagccctgattatccgggtttttgcggaagaacatatcaaacaccagcgtggtattcttaaagccatgcaggaacaggcagtttgccatggtgaattcataaaaatccaccaccatcgcggggttatcgtagtcctcatcggggatataaggctcaaccttgatctcgttcatgaatgttttcctctctatttatacccggcgtcagctcttccctactgcgcgccgcctgccgcttgcccggcagggggatcctccgccctgtcatgacagagcgtttctatcatgatagcacgattcccctgccggtgcaagtattttcgcgcaaaaagaccgctgcacaaacgctgtgcagcggtctctgcgcttaaatcaatagattcttttcagaacaggcttagccgttcatgatgctgggggtggcgttcttcagcacaacgtcgtggctgccgccctccacgatggaggtggaagaaacaacggtcagcttggccttctgctgcagctcggggatggacagagcgccgcagttgcacatggtgctcttcaccttgtacagggtggtctgcacgccgtctgccagaggaccggcgtaaggcacatagctgtccacgccctcctcaaagctcagtttggtggagccgcccaggtcgtagcgctgccagttgcgggcacggttggagccttcgccccagtactccttcatatactggccgttgatgcgcaccttgttcgtggggctctcgtcaaagcgggcaaagtagcggcccagcatcacgaagtctgcgcccatagccagcgcgagggtgatgtggtagtcgtggacgatgccgccgtcggagcagatgggcacatagatgccggtctccttgtagtactcgtcacgagccttggcaacctcgatgacagcggtagcctgaccacggccgatgcccttggtctcgcgggtgatgcagatggagccgccgccgatgccgatcttcacgaagtctgcgccagcctcagcgaggaagcggaagccctcggcgtccaccacgttgccggcacccaccttgacggtgtcgccgtagtgctcgcggatccagccgatggtgcggctctgccactcggagtagccctcagaggagtcgatgcacagcacatccacaccggcctctaccagtgcgggcacgcgctgggcgtagtcgcgggtgttgatgccggcgcctacaacgtagctcttgttcttatccagcagctcgttgacgtttgccttgtgggaatcgtagtccttgcggaataccatatacaccagattgccctcggcatccaccagcggcagggtgttgatcttgttgtcccagatgatgttgttgcagtcgtgcagggaggtgttggccggagcggtgaccagcttttcaacgggggtcataaaggtggtaacacaggcatcgtccggggtgtggttgacgcggtaatcgcgggaagccacgatgcccagcagcttgccgttaggagtgccgtcggcagtgatggcgatggtggagtggccggtgcgtgccttcagctccagcacatcatgcagggtggcagtgggagccagattggaatcggacaccacataaccggccttgaagctcttgacgcggcgcaccatggcagcctcgttttcaatgctctgagagccatagataaaggaaacgccgccctgacgagccagtgcaatggccagcttatcgccggagaccgactgcatgatggcgctgatcatggggatattcatctgcagcgggcactcctcctgtcccttgcggtacttgaccagcggggtcttcaggctgaccgccgtgggcacattctccgcagaggaatagccggggaccagcaggtactcgccaaaggtgcgggagggttcttcgtagaaataagccataatcaaactccttttctcttaacgcatccgatacaaatcagcatcaaaatcattcatgtttgctgcttataaattgattgtatatactttaccacaaagcccgcaagaatacaaacccctgccgcgccaaactttataattgtcctttgcggaaaaacagacaaattgacaagcgttttcgggcattggtcatactttgatttttgaagtatcacttttgcaagccaaatcaggcttacggaatgcaaaaaagctcgtccgaaacatcggacgagcccttttgcacacgaagcgggacactgcctgtgcggcgcatggatcatagctgtgaaggagaacagccggaggaggaggacccgcgcccagtatcccaaaaaacaagaagaaaaagatttcacacacagccttgggggctttgcccttgctgtaaccatattgtaactcttttgaaaccattttgcaatagggttttgtaatttatttgtaatttattttgttaactttttatgtcctgccccgccgggctgccgcaaacatcatttccctttttgtacccggtatggtatacttactttgaatatgctgccacaggcagaaaaaaggagtttaggatacggtatgaaaaaaaaattgggtattgtgggctgcggatttctgggcaacatcgtggctgacgcgtggaagaagggtctgctgccggactacgagctggtgggcgtgaccagccgcacccgcgcttcggctgaaaagaccgctgccaacgtcggctgcgccgtctgcgaggatgtggacgcgctgctggcgcttgaaccggagtacatcgtggaggcggcctcggtggagtcggtgcgcgctatggccatcccggtgctgaagcggggcgtcaatctggtcattctgtccatcggtgcctttgcggatctggatttctacgcacaggtcaaggcagccgccgtggagggcggtgccaaggtgcacctggccagcggtgccatcggcggctttgacgtgctgcaaactgtcaccctgatggcacaggcgcagggtttgccggagaccgctggcatcgagacccataccggtgcaaagggcttccgcaacaccccggtgtgggcagagcatctgctgaccgacaccgaaaagaccaccgtgttcaccggcaatgcaaagcaggccattgccaccttcccccgccgggtgaacgtggcggtagctacctctctggccaccaccggccccgagatcaccagtgtgaccatgcactccgtgcccggctgggtgggcgacgaccactgcatcactgctgagatcgagggcgtgaaggctgtggtggatatctgctcttccaccagcgccattgcgggctggagcgccgtctctctgctgcgcaatctggcctcgcccgtctgcttctactaatataaggaggagtccgtcatgtttgaaaagcttgttgccattgagcctgtcagcctgatcccctctgccgaggaggagctgcaccgctacgccaaagaggtagtgctgtaccgggacgtgcctgccagcgatgccgagatggtgcgccgcatcggggacgccgacgccgtgctgctgagctacacctcccgcatgggcaaggaggtcattgcgcagtgccccaacatccgctatatcgggatgtgctgcagcctgtactctgaggaaagcgccaacgtggatatcgcctacgcacgcacccggggcatccaggtgctgggcatccgggattacggcgaccgcggcgttgtggagtacgttctgcacgagctgaccggtctgttgcacggttttgggatgcccatgctgcgggacgagccggtggagatcaccggcctgaaggtgggcatcgtggggctgggcgtttccggccggatgatcgccgatgcgctgcaatttatgggcgcagagatcagctactttgcccgcagcgcaaagccggacgccgaggctgccggtatgaccttcaagcccctgccccagctgctggcggacagcgaggtggtgttcacctgcctgaataagaacgtgctgctgctaggcgaaaacgagtttgcccagctgggtgcgggcaaggttctgttcaacacttccatcggccccggctttgattccgctgcgctggaaaagtggcttgacctgcccggcacccgcttcttctgcgacacccgcgccgccgcaggccccgtggccgaggacttcttttcccgggaaaacgtgcgctgcgccaatgtgtccgcaggccgcaccaagcaggcctttgtgctgctgagcaaaaaggtgctggacaacatccgcaccgcactgggcgaataagcggtgcattttgcgcggcctgtttttcttgcatcttttccccgattgtggtatgctttctagtgtaaaaagggagcccgtgcaagcgggctgagagtgggctgcattgccctgacctgtgacctgatttggatcatgccaacgtagggagatagcgcttttatctgcggatatgtctttgcgggcatatccgcatttttgctgcaaaggagcattttacccatgaaaactgcattgaccattgccggcagtgattccagcggcggtgccggaattcaggccgatatcaaaaccatgaccgccaacggcgtgtttgccatgagcgccattaccgccctgaccgcacagaacaccaccggcgtgaccgccatttttgacaccacgccgcagtttctggcacagcagctcgatgccgtgttcaccgacatttacccggatgcggtgaagatcggcatggtatcctctgccccgctcatcgacaccatcgccgagcggctgtatttttacggcgcaaagcacattgtggtggaccctgtgatggtggccacctccggcgcaaagctgctgcaggacgatgccgtgcaggcactgaccgaaaagctgctgcctctggccgaggtgcttacccccaacatcccggaggctgagatcttgtccggcatgagcattgcaaacgctgccgacatggaggccgctgcccgcaccatcagcgagcgctacggctgcgccgtgctgtgcaagggcggccaccagatcaacgatgccgacgacctgctgtggcagggcggcaccggcaagtggttcaagggcaagcgcatcgcaaaccccaacacccacggcaccggctgcaccctgtccagcgccattgcttccaatctggccaagggctacgaccttgacacctccgtggagcgcgccaaggcctatatttccggctgcctgtccgctatgctggatttagggcacggctccgggcccatggaccacaccttcaacctgaagggagattttgtccgtgactgacctgccctttgtctcggcgctggtgcaggccgacctgcctgtgtgggagcagtgtttgcagaccgattttttgcaaaagatggagaacggcaccctgagcgaagactgctttaaaagctacctcgtagaggacagcctgtatctgcgggagtacgccaaaatttttgcgtggggcatgaccaaggccaccaccatggctgccatgcgcacctactattccctgctgtccttcgtgcaggagaacgaggacctgacccggctgcggtatctggagcagtacggtctgcgggaagccgatatccagtccctgcccctgcgcccggaaagccgcgcctatctggactgcatgatcgatgctgcccgcaccggcgagggggaagctgagtgcctgatggcctgcctgccctgtatgctgagttacgggtggctattccagaagcttttgcagcgctcccccgccgtaaaggacacctactacggcgcgctggtgctggactacgccggtcccggctacgatgccgcctgccgtgcatgggcagagcgcgccgaggcggcctgcaccggcctttcgccggagcgtgccgcccgttgccgcgcgatcttccgcgcctgctcggagcacgagctgcacttctgggagatgtgtgcaacaccccggacggatatttaagaataaatatagagaacccggaaggtccacagaccttccgggttctcttcttgtaaaatctttatcgcagcaccgagagttcctcgatgccatagcgctgcatcaggacgatggctgccggggtgatctcctcgccgctgaccgccacagggatggcgggcgggcaggacaccgtgggcatggcgcacacccgccccagcgccttgtgtaccgggatgcgtacctgtgcgcccagcaccgcctgccggatggtacagcgctgcaccgcctgctgctgcaaggcggcaaactctcctgcccggttctcggggcggggcagtacggcgggcacggcagccagaagctgttccagcgccgtttgcaggcgcgtgtagtcctgcggcgggttttccggggtgaacatcagcaccacataacgggggtcggcatactcgcactccagctgtgcgcggcgcaaggcttccgccagcgccgtgccggtgcagccaagggcggcggcgtccagcgtaagcttcatcggctcctgctgtgccccggcaactgccagcggcaccgggcactgccgcgccgctgcggccttattcaggctgcggcgcagaccttccagcgccgcgcagcactgcaccagccgccgggggtagtcccctgccagcaccgcattgcaggcatccagcgactgcaaaatgaggtaagaggggctggtagagccgaacagcgccagcgccccccgcacagccgcttcgtcctgcacaggggcatcgtgcgccagatgcagatacgcaccgccggtgaccaccggcagggtcttgtgggcagagtcgcagcacatggccgcgccctgcgcgatggggtggcagttttgcggcagaaagcgcaggtaggccccatgggcgttatccaccagcaaaggcacgccctgcgcccggcaaaccgccgccagcgccgggatatcctgtactccgcccagataatccgggctggtgacgtatacgccaaagggggtgatttcctgctgcgccagcgcgtgcaaagccccggtcagtgcttcggctgtgacggggcagctgcacagtgcaccctctgcctgcgcagacggccagagccagcggatatcaaaatccagcagcgccgccgcgtacagcagcgccttgtgggcgttgcgggcagccagcagcaccgggcgcttgccgttttgcggtgcgctttgcagcgccagaaacagcatggcacggatgcactgagacgacccctcggtgctgtaatagctgtgcgccgtgccgaacagccgggtggcgttggcttcactctcggcaataatgccctccggcgcgtaaagctcgtctgcgccgcagatctcggtgatatccagcggctcaaagcctaaaaggctctgccccttgtggccgggcatatgcagccgggcggtgccggactgtgcatagctgcgcacaaaatccacgatgggggtggtcatgctcattcgcaggcttcgccatcggcgcaggcgttgcaggtagagcccagctcaatgggcacctcgatgcccttggcagccagttcctgattctcggctaccttgatcataatggcgcactccatgcgctttttgaacagctcgcagccgtactcgtacacgccggtaatgctgccggtggcgtggtaggagttggcagcgcagccgccggagcaatacagctttgcccagcagtcctgacactccttgcgggcgtaggcgttgcagtgcttgaactcatcccgcacagcggtgttggtaacgcccttccagatatcgcccagcaggtacttggggtcgcccacgaactggtggcaggggtacagatcgccccagggggtaacagccatgtactcggtgccggagccgcagccggagatgcgcttatagatgcaggggccgccggtcaggtcgatcatgtagtggtagaaggtaaagcctctgccctcgcggtcgcgcttgatcatctccttggcaaggatctcgtactgctccttcaggatgggcagatcggcctcggtcagggcgctggggtcgctggggtcgcagaccaccggctccatgctcagctcggtaaagccgaggtctgccatgtggaagatatcgttggtaaagtcggtgttaaagtgggtataggtgccgcgcatatagtagttcttgtcgccgcgcttcttgacgaactcctggaacttgggcacgatgcggtcgtagctgccgttgcctgcgcagtccacgcggaagcggtcgttgacctccttgcggccatccagactcagcaccacgttgtggcactccttgttgcagaagtcgatgacgtcgtcatcaatgagcacaccgttggtggtcatggtaaagcggaagttcttgttatggatcttttcctgctcgcggcagtaggccaccagctttttgaccatatcaaagttcatcagcggctcgccgccaaagaagtccacttccagattgcggcgggtgccgctgttctcgatgaggaagtccatggcgcgcttgcccacctcaaagctcatcagggcgcggtcgccgtggtaacgtccctgcgaggcaaagcagtaagagcagctcaggttgcagctatgggcaacgtgcaggcacagcgcctttaccacggtgttgcggttcttgaagtcaaaagccatgtccttatagacatccgggctccacagcttgccgttttccttcaggctggtcacgtcgtcgatgcactggcgcagatcctcctcggtcacgtccgggcggctgccgtattttgccagcatggcggcaacgatctcgtctgcggtatgctccgggtacatggcgatgacatcgtaggccacctcgtccacaacgtgcaccgagccgctgcaggtgtccagcacgatgttataaccgttcaattgatactgatgtaccattttacactccattccagattacacaaaaaaatgccgcccggcaaaggcggcatagggtttgcaaaaattacttgttgctgttctcgcactgctggttagccacgccgcaggaggtcttgcaggcggactggcaggaagtctggcactcgccgcagccaccggtcttaacgctcttggtcaggtcacgagtagcaatagtcttaatacgctccatgatagaaacctctctaactctcaaaattttatcgcgccggacatagttccggtacgcttttatcttgtaataggatatcacgcagcgcgccttttgtcaagattttttcgctaagcctttttacccgcccatgggctggtagcgggtaagcaccgtatgcagccccagctctcgggcgcgtgccagtaagtaccggtaacggcacagcagcgcctgccgctcgtaaatacgctgctcgatcaggtccgtatccacctccatatcaaacatcatctcgttgcgcttcaaacagaacaggcattctttcagttcttcttccagttccgggtggtagcgctcgtgctcggtatcccgcgggacgcggggcgaaagcagggtctgggcattctgtgtggttcgttccggcataggcatcctccttctggtgctttgtaaggttttgtaccttccagtataggcggtgcggtgcgcagaacctgccgaagcgtggcagcgctccggcatagattatccggcgctgctgcggcattttccaaaaaagtacaacttttttcaaaaatatgcttgacaactccgggcttttcccgtataatagcacacgttgagcggctcaccccgcaaaacacaacagaatattggggatttgcatagtggtagtgcggtagactctgactctacttgtgggagttcgattctctcatccccaaccagactaaagccatctgaggaagctcaggtggcttttctgtttatatcattccgaaccaccgccgcaaggccgtgactcttcaaaacttgaagagtcataactctattaccactttggatttttgaagagtgacaaaaaagaagcgcatcagcgtttaaaagttcactcttcaagatgaagagtcatggcctgaaaacgcagttttctttgctttttgttcatgactcttcaaaacccctgtgggtcatagggaacttttgaagagtcacccctgccggggaaactcccccagtctgctgcgcagacagccccctcggggatggggcctttggcatggtgggaaagttcccggtttcgccagaggctccctcccagagggagctggcaaagccgtcaggctttgactgagggagtttccccgcacacacaaaaaccgggcagcccgcagactgcccggtttttttgctataccgttgattttgccttaataaagagctttcttttacagaatagtaatgcggcctgcgccgtagggctgctcgtagttgagcaggtagccggggtatgcggccagcgggctgttggcgctggacaggtgcggcagacccgcagcatctgcgccgtcaaaaatcatagcgtaggtagacatcaccagataatcctcggacacatagtccttgatcagctctgcgccgtcaaacatggcaaagccgtcgcccagattgcgcagggtgtagttcatgccggccagcgcgtaggtagcgcccgggtccagcggcagatagctgccggaggccttatcgtagatcttcacgttctgcacgcgcggggtgccggtggcgctgccgatccagacgttcttctcgtcggtctgcacagtgttggggatatcggtgtggatctcgtaggtagcaccggccacctgcaggaagccgccgttctccttgccgtcctcgcctgcaaagcgggctgcaaactccaatgcgtcctggatctgcttgccggtgaccgacatcaggcaggccacgttgccaaaggggctgacctgcttgcaggtcttgaaggtccagtcgcctgcgggcacatcggcgcggatgccgccgccgttcatgatggccacatcacagtgcaatttttccacctcgttgaagtaggtgtagatgccgtcagccacaaagtcgccgaggttggtctcggcagagcggatgcggcgcttgccggtggcgggatcagagacgtagaaatcgctgtcgcccacagcgatcttctcgcccagcatatcgtccacggtgttcacccagccagtctgcatggcggcgatgcctgcgtccatgccctcgtgggtggggatgagcttggtggtaatggtgccgtccgcagcgatggtcatctcgccaacgttggcaaagtaagagccggtctgggtcagggtgacagccttgccggaggcatcctgcacctgcttgttctccattacggtatgggagtggccgtcgataaaggcgtcaaagccgctggtgtgggcaatgacctcctcactggtccacggagaggaagaggggtctacgcccagatggcccagaccgatgaccacatctgccagaagctttgccttatcaatggccttctgcacggcgtcatagagctttttgccgtcctcgccgccctgaatatcgtagatgtacttgcgctgtgccttatccataaagtaggccggggtggacttggtaaaggtctcgggggtggtcacacccacaaaggcgatgcgtctgccgccgcgcacgaacaccttgacggagggcagcacacgcaacgtagtgcgcaggtctacccagttacaggacagatacgggaaatcggcttccttcatgatggccttggcacggtccatgccgtagtcaaactcgtggttgccgggggtggcgacatcgtaaccggcagcgttcatcagcttgatgatggaggcaccctcgtccatggagccgtaggcggtgccctgcacatggtcgcctgcatccaccagcagcacatccttgccggcattctgatagctctgcttcaggtcggcaatggcagcgtaggtcagcttggggctctgcttgtcgatgtaggtatggacatcgttggtgtacaggatggtaacgtcagatttatcaccaacccagcaggccgatgcggcaggcgcaccgatggccatggatgcagcggcagcggtcacaccagcagcctttaaaaagctgcgacgggaaataagttgtttcacaggaaaacgacctccttttatctttggcgtatcgcatttgaggcaggctcttccctcctgccctttcaatagctctagcatagcacagaacgccgccgcaaacaagccaaaatcatccttttgtcacaaataattttcacgttttgctttattttggcacacattgtaccatttttatacaaaaaggcctccccgtgccctgtcgcagagcagcggagaggtcttttttaggggggtgttgacccgttgccggatctatcggaggagagggaaatatcagatagcgttatactccttgaggaacttctcaaggtcggtgccctcgatcttcttcagagcttccttcaaagccagacgcgggatcagcggcagatccatgtcggtgatcttcttgccgtcgcgcagcttcacggtggcatcgatcagagcgcgcacatcgtaggtgctgccccagacctcgggcacgccgcggtcgatgttcagcagggtgtacacagcctccataccggtgcgcatggagtactcggtggtaaagatggtatcgcgggcggtctcggcaaactgaccgaggaaggcaaagttcacagcaccctcgggcacaacatcgggacggtcgcccatggcacggggcatgaagaaggcatcgatatagggcatcatcacaggcacggtgttggcgctgtgctctgccagttccgcgatctgatcctcgggcacaccgatgtggtacagccactccatgcagatctcgcggccggtgcagtcgcgcatgggcttcttgacgtaatcgccgggcttatcgctgaacaggccgtacacccagacgcacagctggttcttgggctgatccttgaactgctgctgacggttcagcgtccagctgatcagccagctggagtccttgacggtgacgatgccgccggtgacggtgtggccgctgaaggggtcgcgcttgcagatcttgcggatatactgaggaattttgtcgtccagcgtggtgatggtggcgctctcccagttgctcagttccggctcggagcagaacttttccgggtgaccgaaggagggatcctgtgcggcgatcttcttccacagatcccagccgttgccgggctggatggtggggtcaaagccggtggccttatcctgtgcacccacggtgcagctttccacgcagccgccgttggtgatgaacagcagatcgttctcggtcaggtcgatgttagaagtctcgcccgcgtgctccacggtgacagagcttgccagcttgcggcccttctggatgtcgaacttcacatccgtgaccttggtgttgtagtggaactgcacgccgaagccttccagatagcgcaccatgggcaggatgatggactcgtactggttatagcgggtaaagcgcagggcggtaaagtccggcagaccgccgatgtggtggatatagcgcttgaggtacagcttcatctccagagcgctgtgccagttctcgaaggcgaacatggtgcgccagtacatccagaagttggtgttgagcacctcgtcatcgaagaaatcggtgatctttttatcctgcagctgctcgtccggggtaaagaacagcttcatgatctccatggcacccttatcggacaggccgaatttgccatcggtgtgggcatcctcgccgcggttgacggtggcacgacacagggagaagttggggtcctccttgttcagccagtagtactcgtccagcacgctggcaccctcggtctccagagaggggatggagtgcagcatatcccacataacttcgaagtggttgtccatctcgcggccgccgcgcatcacatagccgatatcgtacttgtagccatcgcaggcaccgccggccagtgcgttcttttcaaacacatggacgtgctcgcccttcatctggccgtcgcgcaccagatagcaggcagcggtcagcgcagccagaccggaaccgatgatataagcggatttatgatccacgccctccggctttttggggtgtgcaaaagcttcgtagttgccactggaatagtacataaaaaagcctccctgcttcaaaaatatcttttcacagccttcgtcgtgctgctgtctatggcaacagtataccccgcaaagtgaacttgaacaacaaacaaactttgcccggtgtatagattttttacatccgcccttatttgctggaaatgcgtacaaattgtgacatagtgcgaagcgcaaaagcatttaaagcattcccgcaaaaacgcaatgccggacagcttgcaggctgtccggcattgctctaattcaaaataattttccgctattcatgcccagagcatagcggcgggcattcaaaatcgtcccgcacaaaaagagagccgccgcacaaaggtctgtgcagcggctctctatcggttttagttcatctcttccagagcctttttcaggttcttggcgatctggtccgggcagctggtgctgcggaagccgcacagcgtaccgtccagacgggcaatggcgtcctctgccttcatgccggtaagcagctggcagatgcctttcaggttgccgttgcagccgccgacgacctcgatggaagcaatggtgtggtcatcgttcagcacaaagttggtctgcttggagcaggtacccttgttcgggaaggaaaattccttgctcatagtctttacgtcctctctcttttacgtttttcggcgatggcgcgcagctgcgctgcggcttcgtctggtgcggtgcaggtgccgatggggtgggggtgcttgtggttgcggccatggaagtccgtgcccgcagtagccacaagaccgtactgtttgcacagggcaaggcactcggcgctgtcctccgcactgttgctggggtggtacacctctatgccgtccactgcgccctctgccgccagttcgcgcagcaggggcatacttttatacaccgtggggtgggcaaacgccaccgcgccgccgcaagccttggcagtagccaacacctgccgcaccggcagatactccggcgagtgcagcacgatgccccgggggttccacccgaacagcttgtggtaggtctcgccgtagatgctgccatcggtcagacccagcagttccagcgcctgcatcaacccgcttttgaacagcaccccgctggcctttgtggtctcccatgcaaggtcggtggtaaactgcgggtacagctgttccagctcctttgcgctctgcaaagcgcaggcgttgcggcgctccttcatgatggcgcagtgctcccgcagcgccgggcagtccacgtccgggtagtagcacagtaggtgcacccggtgctggcgctcaaagtcgtagccggtcagctccacggcgggaatcagctctaccccgtcctgcccggtgtgggcataggcgtactgagcgctgagcagggtgtcgtggtccgaaagggcgatggcgtgcagcccggtgcgggcggcgatggacgccagccgctcgatgggcacagcaccgtcggagcaggtggaatggatatgcaggtcacaggacatagcgggttacttccttagtgcttatagaaattgatcaggcagccgtcggccaggatctggcgctcgtcggtggtgagcggagccatgtacagctcaaactccttgacggtatcgcccagaacataggccttgatgttctgtaggtcgcccttgagtgcctcccgcacattggggatgagcacataatcccccagaccaaagggggtggcacctgccagctgcaggggcagcatgccccagttgatcaggttggagcggtaacgcttggtggcgtactcggttacgatattggcaccggcacccagcacacgctggcagctggcggcctgctcacgggcagagccgtcgccgggcttgaccgcaaagatggtagaggcgatctggatatcgttccatctcagctgttcgcagccgggcacggcgttcacctttgccagcagggcggcgtcccctgcaccggcgcggcgggcagcttcctcggcctgcacggccttggcgcgactcacatactccgggtccttgcggctgagggtgaactcggccagacccagcggattggaacggtaagaagaggtctcaccggaggggatcagctcgtcggtggtggtgacggggtcggtgatataagaagccaccttcagcagcaggttgtcgcccagcggtgcgatctccggccagtccttgatgttggggccaaacttgagcagggcatcgtaatcgcccttgccaaagccctgatagacgcgggtgtcgtagctggaagcatcgtactggtactccggcacggtgggatcgtaatcaatgtcggtggcgggggtcaggatgccgccgtttgcggtggtggctgcaatgctgcgggcatccatcagtgccacaccggccagctggccgctgccgggcttggagccctcgcggctggggaagttgcgggtggtgtgacggatggacagtgcaccgttggcgggcacatcgcctgcgccgaagcaggggccgcagaaggcggtgcggatggtagcaccgctggccatcagctcgccgatgacgccggtgcgcaccagttccatcatgatgggctggctgccggggtaaacgctcagggcgtagtcgccacagccgccggtgtgacccttgaggatggaagcagcctcgtagatgctgtcgtacagaccgcctgcgcagcctgcaatgacgccctgatccacacgcagcttgccgttctcgatcttgctgcacagatccagctgcacatcctcgcggccgatcagcttctgcacatcctgctcgcaggcgtggaggatgtcctccagatttgcgttcagctcctcaatggtaaaggcgttggaggggtgcatgggtagggcgatcatgggacggatggcagaaagatccacctccaccacgccatcgtagtaggcaaggtctgccggtgtcagctttttgtagtccgctgcacggccatgcactgccagaaaacgctgagtgacttcgtcggtctcccagatggaggacaggcaggtagtctcggtggtcatggcatcaatggcgttgcgggtatcctgccgcagggaggcaatgccggggcccacgaactccatgaccttgttcttgacatagccgctcttgaacagcttgcccacaagggcaatggctacatcgtgggggccgcagcccaccggcagactgccggtcaggtagatggccaccacgccagggcgggcaacatcataggtgcggcccagcagctgctttgccagctcgccgccaccttcaccgatagccatggtgcccagtgcgccgtagcgtgtgtgggagtccgagccaaggatcattttgccgcagccggcaaagcgctcgcgcatatactggtggatgactgccatgtgcgggggcacaaagataccgccgtactttttggcagcggacaggccaaagcggtggtcgtcctcgttgatggtgccgcccacagcgcacaggctgttgtggcagttggtgagcacataagggatgggaaacttttccagcccggacgcacgggcggtctggataatgcccacaaaggtgatgtcatggcttgccatggcatcaaacttgatcttcaggttctcggcatcgccgctggtgttgtgtgcctgcataatattgtaggccatggtaccggtcttagccgcggcaacggcagcggcatcaaagccctttgctgccagtgctgcgggtgcattgccatctgcgggcacccactctccgcgcgcatagtacgcaccgccggtgctgcatttgatcatatccaacatctcgattcgcctctctttttgtattttcccgcccgccgcaattgcgggcattgccccggcagtgcggctattcatcccgaaaacagccgtccccttagccttcaccccttggggggaaggtggcgcacagcaccggatgaggggtatttcttggcaacagcaccctcatcagtcgcctgcggcgacagcttttcaaagacttataacccctgccctgttacggcaaaagccgtatttaatttttattatagcatgaaagggcgaaaagaaaaagcattttttatgaacccttactgcacctttgcggcggcttcctgctgcttttccttttgcagtttacggaacaccacaaaataggccgggatcaggaagaagcaggcaaagagccatgccaccgggcttgcgatgcaggcggcaaagtagccccacagcggcacgaaccagaagcccaccatggcgcgggcgatcatctcagccacaccggcaaacatggcaaggccggagtgacccagaccctgaatggtgtagcggtagatgataagcactgccagcgggatgtagaacacgctgttccagaagatgaagtcctgcgcattggccataatggcggtctcgcctgcgtccaggaacaggccgatcaggggcttgtccagcacgcgcaggatgaggaaggaggccacgctgtacacgcagccgatgcccagtgcggtgttcacgccgcggttcacgcggcccagatccttagcgcccatattctggctggtgtaggtggtcatggcggtgccgatgctctccagcggcacgcagaggaactgcgcagccttgccgccggcggtctgcgccgccacgatgtcgctgcccagaccgttcaccgcgccctgcagcaccacgctgccaatggcggtaatgctgcactgcagtcccatggggaggcccatggcgcaaagctttgcgcagtgcggagcgctgatgcgcccttcttccttattccagcgcagctccgggtagtggcgcatgatgtaaataaggctgccgatgcccgccacagcctgactgaacacggtggcaaaggctgcgccgaacacgcccatgttgagcacaatgatgcaggcaaggtccagcccgatgttcagcacgctggccaccagcaggaaatacagcgggcgcttgctgtcgcccagtgcacgcatcagggcgctggtcacattataaagcaaggtaaaggggatgcctgcaaaaatggtgcggatatagatatccgcaaggtcgatgatgtcagccggggtgttcgtccacaccagcaccagccgggtcatagccaccgtaacgatggtgagcaccgtggcaaaagcgatggacagccacacggtattggcggtgtagcggcgcatctcgtggtggtcgtgggcgccgaaggtccatgagatggggatggaaaagccacaggcaatgccgttgacaaagcccagcaccagatagttcaaaccgcccacactgcctaccgccgccagtgcttccacgcccacgaaccgccccacgatgatggtatcggccagattgtagaactgctggaacaggctgcccagcatcagcggcacagcaaaggcaagtagcagcttcagcgggctgccctgcgtcatatctttggtcatggaaatatacctcctgcccacacaaaaaagatggatgttcgcatttttgccgtgaaaaacgccctgccggaaaagcggcaggacgttgataaagattcatgagtggtattatagcggagcagcgccggttttacaagacttggtttgcatcaacatttccatttttttgcccaaagaattggtgattttgctcattccgcgtagtgtgccagaaactgtttggtgcgctgttcgcgcgggtggtcgatcagctgctttgcagggccttcttccaccaccacgccgccgtccataaacaggatgcggtcggccacatcccgggcaaagtgcatctcgtgggtcacgatgatcatggtggtcttgcggtcggccagctcccgcagcacccgcagcacctcgccggtcagttccgggtcaagggcgctggtgggctcgtcgaagcagaggatgtccgggtgcagcgccagcgcccgggcaatggccacccgctgctgctgcccgccggaaagctggtgcgggtagtggtctgcccgctccgaaagccccatctgcgccagcagttcccgcgcctgctgttccagctgggcgtgcaccgcctttttgttggcgcggtagtccgggcgctcctttgccagcagctcccctgccagcatcacgttctgcagcgccgtatactgcgggaagaggttaaagttctggaacaccagcccgaagtgcagccgctttttgcggatctcgctttcccgctgggtggcggggtcggcggcgtcccacatggtctcgccgttcacccggatgcagccggtgtccggccgctccagaaagttcaggcagcgcagcagggtggtcttgccggagccggacgagccgatgatggccagtgcctcgccctgctctaaggtaagggaaatgtcctttaagacctttgtatctccgaaatttttgccaatgccggaggcttccagtaatgccatattcttaaaaccctcctcagcagcggaaataatccagtttcttttcagcccagttgaacaacagggtgagcgcgcctacaaacacaaggaagaacagcgccgtggagaacagcggccagatcaagccctttgcgctgtactccttggccatcatgatgatctccttgttggcgatggtgtttgccagcgaggtgtccttgacaagggtgatgatctcgttgcccatgggcggcaggatgcgcttgaccacctgcaaaagggtgaccttgaaaaagatctgcgtgcgggtcatgcccagcacctgcccggcttcggtctgccctttgggcacggcctcgatgccgccgcggtagatctcggaaaaatagcaggcgtagttgatggcaaaggctaccaccgccgccaccatgcgcccgccggagccggagggccacggattattcatgcccagcaggccggggcccagataaatgacgatgatctgcagcatcagcggcgtaccgcggatgacccagacaaaggtctttaccgcaccggacagcagcctgcaccggctcatggagccaaaggccaccaccagccccagcggcagcgcaaacagcagtgtaagggcaaacagctcacagttgagcaggaatgcgccggaaaggcgtccaaggatcacagacacaaaaacacacccatctatcgttttgttttacgcccggctcagtcggccagcgccagctcgtacttctcggccagtgcctgcatggtgccgtcagccttcagttcgtcaaaggcggcgtccactgcggcggcggcatcactgcccttgcggaaggccacgccgtactcctcggcgttcagctcgtccacaatcttcagaccggcgtagtcggtgccttccccgatcatggcgttggcaagggtcagatccagcacagcggcatctgccgtaccggcagccacttccatcaggcagtcggtctgcacgctcttggaaacgtagtctgccttggcaaggttctcgtcgccctgaatggcggcttcaccggcagaaccggcctcggccaccacggtcttaccggcaaggtcggcggtggaggtgtaggcggtgtcctcctttaccatcacgacctgtgcgttcttggcgtaggccttggtggtggcggtgttggccatgatatcctcggtcagggtcatgccgttccagatgcagtcgatgctcttggcgtccagctccaccaccttggtgtcccagttgatctctacgaactccggctctacgcccagctttgcacacaccgcagtggcaagttcggtatcaaagccggtaaagttgccgtcgacgtcggtgtagttcatgggctcgtacacggtatagccgatgaccattttgcccttgcccttgatgtagtccagatcgctgcccgctgcggaagaagtcgaaccggctgcgctgccggaagcagatgccgcagcagaggtggatgcactgccgccgcaggctgcaaggctcagtgccagagcaccggccagaaatgcacttgcaatacgcttgagtttcatatctttttcctcccatgggggacgttctgcgtcccgcttccctcttgatttaccattttaccatgctaaagtggtaaactgtggttatagaatagcgcgtttgtcgccgttttgcaagaggaaacctttattttttgcacaatgcactgctttgccccgcctgtaagcccgctttttgtgggaaagtgtgcacataccccttccggctttgcgcctgagggggtatccataaaaaaatccccccgcactttttgtgcagagggacatcctgtttttatgattactgctccgccatggccttcagcgccgctttttgcaggtcggtaactgagatggtgcacagcgccttcaggtcggcatccgtgccgtctgcggagagcttgccgatctccacggcgtttttgcccttcagatagccgcaccagcctgcgctgtgctcgtaccattccttgcctaacgcgcttgcgctgcgcattccgtagcggtcgcccagctcgtttttggtgtacaccggctcacgcggggcagatacggtgccgtccgcgctgacggtcagctccggctcggtcatatcgccgatagcgctggtcacccgggcgttctcgtccatggtcaccaccgccagcgtgaccttagcctgcacctgtgcgtccttgtcgtctgtgcccgcaagcccctgcggcatttcggccacctctacgcccagcttgaccgtatcgccccgggcagcgcccagcacctgcgcgttctcgcaggcgcggacgacggcatcccggtagcgatccaccgcgatggtgcagccagagagaaggtctgcatctgttggcttgccgtccgcatccgttttcagcttcttcacttcctccggggtcttgccctcaagccaactgccaaaggcatctgcctgctctgcccagccctttttcaggccggacacctctgccagtgggtagtccttgcccttctggcgcttggtgcgggtgtcggtgggggtggtcaccttgccggtgctgtccgcactgactgaaagctccagctcatccagtgtcaccccggccagcttgccgtctgcatccaacagcacggcagccgctacggtgtggatgttgcccgcacggtctgtgccggtcgtctcggtcaggacccccagcccggtgcgccacgccgcgctttgcgccgcgctgctgcccgcagatgtgctgccgctcacagaaccggagctgctgccggagtttcccccgccgcagccggtcaatgtcagtgctgccgccagcgtgcagcacaaaaaccaacgcgatgcctgtttcatatcgtcacatacgctccctttccgtgcctgcattgcagacgcaggctttggagctagtgtgccccgccgcgcgggttttatgagcaaatgtttacatcagcgggcttaacagccgtagcacgctgtccagcaccgtacccaccagaccggtgcggcagtccgcgcactgcacctcccggcactggtacagggtgcggcgcacatcgtcccgcaaagccagcacctggctattttgcagcagcagcaccccgcactcgaagtgcagaaacatactgcggtagtccatattgatgctgcccaccaccgccgcgcggtcatcgctgacgcagcacttggcgtggagaaagcccggggtatactcgtagatgcgcacccccgcccgcagcaggggcagatagtacgagcggctcagccggaacaccagctttttgtccgggatgcccggcagcaccagccgcacatccaccccgcgcttggcggcgttgcgcaacgcgtccagcatctcctcgccaatggcgagatagggcgtataaaaataaacgtaatgctgtgattgtgccagaatatccagatagaccgtttctgccaccggctcttcgtccagcgggctgtctgcgtagggctgtactactccatcgctggcaggcagcaccgcaagctgcggacggaaggtgctgtaatcctgctcaaagggacggaaggcattccagaaatccagaaacattacggtaaagttccacaccgcagcgccctcgatgcgcagacccgcgtccttccagtagccgaagcgggtgatcgcgttgatatattcatcggccagattgatgccgccggtgtaggctactttgccgtctatcaccacgatcttgcggtggtcgcggtggttcatcaccagcgagagcagcggcaccaccgggttaaagggaatgcagcggatatgcgcccgctccatgcgcaccacaaagtccttgggcagacccagcaggctgccgaagtcatcgtagatcagccgcacgtccaccccctgcgccgctttgcgccgcagaacatcctctacgccctgccacatcttgccctgactgatgataaaaaactccagaaagatgctcttttccgccttttcaaggtcggccagcagtgccgggtacatggcctcaccgcaggaaaaataccgggcggtggtgttcttccatgcgggatagcagccgtactgggtcaggtagcggctcacgccccggttttcatcgcacagcccggcggtctgtccgggctgctgagcgcggtctgcccggtgcgcctgctccaccgcctgcattttgctgcgcagacggcgggagggccgcttgttgccaaaggccagatacagtgccccgcccagcagcggcaacagcccgatgagggcaatccaacccaccttataggcgctgttttcatccttgcgcaccagatacagaatgatcagcaggcttaacccgttgagcaccccggtgacccacacccgcgccgtgccggtggtgagggcgaaaaacacccacgccagccatgcaagctgcagcgccaccagcaccaccgtgaccgtgatgcggttgaggatgcggttgaaaaatttgacgatcggcaatcggaacagcataccatctcccctttccgtgtttcaatacggttaagtataacgcggtttttccccctttgcaagcttttggtgtcgggtgcaccggcgtgccggccgcctttattccttacaaaaagttcaccggagcgtccgcagatgccccggtgaatcgaaatcatagtatcatattttccgctcagacggtgggtgcttcgttatcctcgtagcccaccatcaggccgccgtactccgcgtagtagctgcacagcgcgccgcagctgcctacctccaccttggcctccgggaacaccgcatggaccatgtgcttcagccgctccgcagcggcagcattgcagcagtggtcgatgtgcacccggccgttggtcaggccgtgcgccttcatttccagcaccatgcgctccagtgcgccgtgctcgccgcgggtcttgcaaagaacctccagatcaccggcatcgctggcctgcccgatgacccggatgcccagcatccgcgccacagcagccacagccggcttcacgcggccattgcgtgcaaggtttgccagagactccagtgcaaacagcagatgcgtgtgctcatggtacgcccggatctcctcacatacggtatcaaagggcttgccggccttgatcagcgccgccagacgctccaccagcagccgggactccgcaccggtggacaggctgtccagcacaaagacccgcgcgccctcgtggctctgctcgtactcctcgcctgccagcagtgcagcgttataggcaccggacagcgtaccggtaatggttacaacatacacctcgtctgcgccctcgtaggcggtgagccaatccgagatattggggcaggaggtgctggtgcgtcccttataggtgcgcagcatctcggccagcgcgggagcatccacctctgcagtgtccacatactcctgctcgtcggtcaggatcttcagcggcacacaggcaaaccctacatcggggagctcgtacacatttgcagaggaatctacaacgattttgcttttcatatttttctccattttcaagcggcgcacgccgcagtcattcctttgtccgtgaccatcatagcagtttttcaaaaccctgtcaactgttttttcaaattcttttacaaagttttctcagaccgttgaccaattttccaaaatgcggtatactatttcacaggcagaagtgcttttgcggaaagcaattgccctgcctttgcacaaaaacaacgttcctgcttgcaaaaagtgcaggagcatgaacggaacaagatactatgaaagctgaaaccaaactccgcgttgcggcgtgtgctgcgggctttgccctgccccggtacaacgatcttccctcggtagggctgtatctggaccagacggtgcagtttatcaacggctacttccgcagcttctgcggggtagaactgaccccgtccatggtaagcaactacgtcaaaaaaggggtggtggatcaccccatccgcaaaaaatacacccgggatcaaatcgcatccctgatgtacattgcagtctccaagaccgtgctctcgatcgaaaacatcgacactctgttcaaaatgcagcgggagcactgctccgccgggacagcctacgatatcttctgcgaggagttagagactagtctttccgtggtgttcggcggcaagacagcccagccggaggccacgctcaacgacgagcgtctgctgctgcgcagcaccatttttgccgcggtcaacaaaatgtatctggactgctgctttgatgccttgcggcaggagcaggctctgtggtcggatatcctgccggatctggcgtaacagaatagcaggtatagcagatatagcaaaagccacctgaaaaacgtaagttttcaggtggcttttgtgttggtggaggcgatgggagtcgaacccatgtccgaaaagagctcagcgtaggtatctccgggtgcaggcgatctacaacattcccgccacgccacgccgatcgtcaggctagcgctttggtagcttcatgagttcctgccggtccgcaaagcttaggtccgttcaggtgctgtgtctaaaggacgccccgaccccacacgacacaagagtgggcggaacgcgcagcactcaggctgcgagcaactgataattattgttgtcagttaatttttttggaggagttatagagcagttcccccactgctacccgctgcccagaccttgctccccccgtcgaaacctttacgcccccttataaagcacatcttgcgatgtgcggaaagcttggttttctgcggtgagccgcagtctgcaattggaatgcttaatagtacttgccgttggacttcacagcccggtcaatggagcgctttgcatcgcgctgggcggcatcggcgcgcttgtcgtacagctttttgcccttgcacaagcctacttccatttttacgcggccatgcttgaaataaagcgagagcggcaccagcgtatagccctgcagtttgcactgctggtgcagacgccggatctcacttttgtgcgccagaagccgccggacgcgcatgggatcctgattgaacaggttgccgtggtcgtaggggctgatgtgcatcccctttaccagcagctcgccgtcttcaatatctacccagctgtccttcaggttgaccccgccggcccgcaggcttttcacctcggtgcctttgagttccacaccggtctccagcgcttccagaacaaaatactcgtggcgcgcttcgcggttggtggcgatgctcttggtcgccgggcgctcctttgtgggtgccatgctgcgcgcctcctttctccgttccgtttgttgtttcagtataccattttttcagggtaatgcaagggctgtttctgacagaattgtaaatttttacaaactcacagctctccccggccggaaagtgcccggtacagggtggtctcatcggcatattccaagctggcgcccaccggcagaccagaggcaagccgggtgacccggatgcccagcggcttgatgagctttgccagatacatggcggtagcctcgccctccacggtggggttcatggccatgatgacctccttcaccgtgtcgtccttcagccgcgccagcagctccttgacggtcaactgctctacgcccacaccggccagcgggtccagcagaccatgcagcacatggtacaggccgttatactcccgggtgcgctcaaaagcctgcacgtcccggggcttttccaccacgcagatcaccgaggtgtcccgcttggcgctggcgcacaccgggcacaggtcagcgtccgtaaagttctggcagatgcggcaccggtgcagccgggtgtgcgcaccgcggatggcatccgccagcgccgcagcgtccttatccgacatactcagcacctgataggccatgcgggtagcgcccttgcggcccacgccctgaaacttgccgaactcctcgatcagcttttccagcggtgcggcagtgtagtccatggtatctccccttcccggctcagagacccggaatgttcaggccgccggtcagcttgcccatctcggcttcggcggtctcatccacctgcttcacggtggcgttgatggcagcagccaccatgtcttccagcatctcgatgtcgtccgggtccacagcctcgggcttgatggtgatggacagcacctcgtgcttgccgttcatcttcacggtcaccatctcaccggcggcgctgccagtgtactcggcggcttccagctcggcctgcttgctcttcatgtcctcctgcatcttctgagcctgacgcatcagggcattcatatcggggcggccgtagcctgcgggcattcttgctttcataatgatgttctcctttattataaacaatttttatcgctttttgcgggcggtatcctcaatgctgacctctaaccccagtttttccagcgccagcaaggactgctccgcgttggaggcggtctttccggccgttttgggctcgtaggggccgatgggcaccggcacgccggatacctcggcgatcagctttttgatcagcttctggctgtccttgttcacccggataaaatcccggaaagtcttgccgccatcgatcagcacgcgggtgccgtcaaagtaagccttggacttgcgcagatacatatacagcatggggtcgatgccttccagcttctgcacgatctgtccccagtacgggaaggggttcgtgccctgctgcgccacgctgcggggctttgtcagcaccgggtcggcagggtgctcctgcaccggggcaggcgtttcctctgccgcaggagccgactgcgcaggctctgcaggggcgggctgctccggctgggtgaccggctccgactcctccggcggcggtgcctgcggggcaggctcgtcccacggcagggcggcgtcgctctgctgtaccggcggttcctctggcatgggcggcagctcctccgcaggggcgggcggtgcttcctgcgcggcaggctgcggaggggtctgctgcacagcaggggcaggctcttctactactgccggggtctggggtgcggcagctgcgggggcagattgcaccggggcgctggcaaagggctgcgccgctgccgcaaaggggcggggtgcttccggctgtgccgcgcgggcgggggctgcctgtaccgttaccgtctgcatctgctggggcggctcggacaggctgaacagtgccaattccagctcgatgcgctggtcgctaccacgggtcatgtgttccagcgccgtacctaacgtgcggatggcgcggatggcttcccgctgccccatctccgggcctttttgcaggtacagcgcttcttcctccggcgaaacaccggacagcagcgcctgcccgccgggcagcgccgccagcatcagggcgcggtagtgggcgatcagttcctcagtcagacgttttacgtccaccgactgctgccgcagctgcgccagctgtgccagcgcggcggcggcgtcctgcgcttccaaggcgtcagaaatgtggaacaggtagctgcggtcggtcacacccgccatacggcgcaccacgtctgcgtcgatctttgcagtgacaccggcgcaggtgtccagaatggacagcgcatcgcgcagcgcaccatcggccagacgggcgatcagctccgcgccgtcggaggtcagctccagcttttcctccccggcgatatactccacccgccgggcgatatcctccggcccgatgcgggtaaaatcgtaccgctggcagcgggagaggatggtggcgggcactttctggatctcggttgtcgccagaatgaagatgacatgtgcgggcggctcttccagcgttttcagcagcgcattaaaggccgctgtggacagcatgtgcacctcgtcgatgatatacaccttatactggcaggcgctgggggtgtaggcggtctcgtcccgcaggtcgcggatatcgtccacgccgttgttggaggctgcgtccatctccaccacgtccagcaggctgccgttgtcgatgcccttgcagatctcgcactccccgcaggggtcgccaccctccgggtgcaggcagttgaccgccttggcaaaaattttggcgcaggtggtcttgccggtgccgcgcacgccggtaaacagatatgcatggcccacgcgccctgcggtgatctggtttttcagggcggtcacgatggcacgctggcccaccacatcctcaaaccgctggggtctccatttgcggtaaagtgcacgatacatggcgatctctctcctttcccggcctttgcggcaaaaataaaaggacagcgctcgacggggttttgtccccgccttgcgtaactcggcatacggatgcaggcttactgaaacgcacgaacgcactgcttaaggctgcttggttccccacctgacctggttcacagcgagcccatcgtacaggacccgcatccgtatgccgaaccacgcagcaggcgctgtccgacacatccttgtggatgctaagatattgtaccataaaccccgccggattgcaagagggggcaaaacaaaaaggagaagcccgaaggcttctcctcgtttgtgctaaaactgtttaagactggcaagcggtgatcaggctcatcttgtacacctcgtctgcattgcagccgcgggacaggtcgttgatgggtgcgttcagaccctgcaggatggggccgtaggcagcgtagccgcccagacgctgtgcgatcttatagccgatgttgccggcctcgatgcaggggaagatgaaggtgttggcctgaccagccaccttgctgcccttgcacttgacctgtgccacctcgggagcaacggctgcgtcaaactgcagctcgccgtccacagccagctcgggatccatctcctgtgccttgatggtagcatcgtggctcagtgccacggtgccgcccttgccggagcccttggtggagaagctcagcacagccaccttcgggtcgatgccgaacagctttgcggtgcgggcagtctccacagccacctctgccagcttggaagcggcagagatcttgacctcgccggtagccttatcgacggtatcggtgtaatcaatgttgacggcgcagtcgcccatggcaatgcgcttcaggccctcttcgccgcagtcgcggtccagaataaagcaggagctcaccagatgtgcgcccttcttggtcttgaccagctgcagagcgggacggatggtgtcggcggtggagtaggtagcgccgcccagcaggcagtctgccttgcccatcttcaccagcatggtgccgaagtagttggacttcttcagcagggcggtgcactcctcagcggactgcttgcccttgcgcagctccaccatggtgctgaccatctcatcaaaaccggcgtagttctccgggtcgatgatctcggcagcggaaatatcaaagttaccggcggcggcagcagccttgcactctgcctcgttgcccaccataacgaccttcagcacgccctcggccagcagcttgcttgcggcctccagaatgcgggggtcattgccctcggtgaacacgatcgtcttgggatttgccttcagctgtgctaccagcggtgcaaacatatcagccattgtgattacctccgaaaatgctttccaaaatttgcattccgtgtctgttggacacaaggatgcctttcttctttattctagcacagacggcaaaaagttcaagacaaaattgtgtttttgtgctatattttaggggagaaacctttgttttatttgtgaataaaatatcataccagttttaaaggagatgttctccatggatatggatactttaaaggccgaatgccttgcctgcacccggtgcgagctatgcgccacccggacgaacgtggtgttcgggcagggcgtgccggacgccgaggtgttgtttgtgggcgagggccccggccagagcgaggacgagcagggtctgccctttgtggggcgcagcggccagctgctggacaaatacctgtttgccatcgaccttgaccgcaaaaagaactgctatattgccaacatcgtcaagtgccgcccgccccagaaccgcgacccgctgcccgccgagagcgaagcctgtatgccgtggctgcgggagcagttccggctgctgcatcccaagatcgtggtctgccttgggcgtgttgccgcccagcggatgatccggcaggatttttccgtcacccgggagcacggacagatcattgagaagggtggcattttgttcatgggcaccttccaccccgccgccctgctgcgccaaccccagaacaagcctgaagcctttgcggactttaccgtactgcgggacaccattgccgccgtgtgcgagcatacctatcataaataaggacaggaaccaaccgcgccgcttttgcatactgtaaagcaaaagtgaggtgtttttgtatggaaagttccgtgcatccttctgtggatttctttttgggcgctacaacgcccgccgggttcaagggctactttgcgccgctgcgccgggagcccgggatgcagctggtgctgctcaaaagcgggccgggctgcggcaagtctaccctgatgaagcggctggcgcgcgccgcacaggataaaggcgaacccatccagcgcatccactgcgccagcgaccccgacagtctggacggggtggtgttcctgcggcagaaacgcgccatcatcgacgccaccgcgccccatgtggtggaaccggaagcccccggcgcagacgagcgggtgctgagtttgtaccacaccattgacgccgatgccctgcacccccacaaggacgaggtgaccgccctgtttgcccgcaaccagctgctgcgcagccgggcggcgcggtatgtggcctcggcgggcagcctgctgctggacagccgccgcgccgaagcgtgcagcgccaactttgaaaaagtgcgccgctacgtcaagcggctgtgcatccgcctgttgccccgcaccgaggagatgggctctgaagagctgcggctgctctcggccatcacgcccaagggcgaggtgttctatcagggcacggtgcaggcactggcagacaaatgcatcctcttccgggacgactacggggcagtctcccgcctgctgctggaactcatccgcgccgaggcgctggcgcggggctaccacatcatcacctgcccctgcgccatgcacccggaggataagatcgaccacattatcatcccctccctgcggctggcgttcctgaccgacaatcgctggcatccggtgcggctgtctgcggcgcagaccgtgcggtgcagccgttttgtggatagagaaaacctttctgcctgccgtgcacggctgcgcttcaacgagcgcgccgccgccgaactgttggaacaggcctgtgccctgatggcgcaggcaaaaagctgccacgacgagttagagacctactaccgcaccgccgtagactttgcacaggtggatgccgcagccgcccagtgcatggagctgttcggggtaagataacgaaaaaaaacggaggtgaaacgccttggcaagcatccatctgcccatccggcagctggtggagtttttgctgcgcaccggcagcatcgacagccgctttgccggctttgaccgcgccaacgagggcgcacgcatccaccgcaagctgcaaaaggccgccggggagggctatcaggccgaggtattcctcagcgcggagcgggaagcctgcggcatcgcctttacgctggaaggccgggcagacggcattttcaccgacgaaaacggcactgtgaccattgacgagatcaagaccactaccgtcccctatgaggagatcaccgaggagctgaatccctgccactgggcgcagggcatggtatatgccgccatttacggcagccagcagggactggatgcgcttgccgtgcggctgacctattatcaggtcgataccgatcagattcagcgctttacccggcagttcacccggcagcaattggaacagtttttgcagcagcttttagcgcagtacgccccgtgggcgcagcggcagctggactgggacacccggcgcagccaaagccttgcggcgctgcaatttccctttgcggcgtaccgccccgggcagcgtgcgctggcgggcgaggtgtaccgcgcctgtcgcgctggaaaaagcaccgaccgcaagggcggcacccgcgttttttgtcaggcacctaccggcatcggtaagaccatgagcgcgctcttccctgccctgaaagccatgggcgagggctgcggcgcaaaactgttctacctgaccgcccgcaacaccacccaagccgctgccgaggacgcagtggcgcggctgcgtgccgcacagcccggccttgccctgcgcagcgtgaccctgaccgccaaggaaaaggcctgtctgcacccggacgccgaagggcacccctcctgtctgccggaagtatgcccctttgccaacggctactacgaccgccgcaaggacgcgctggcggctctgctggacggcagcggcagtttcagccgtgccgcgctggcggacaccgcccggcagttctcggtgtgcccctttgagctggggttggatctgagcgagtggtgcgatgtggtcatcggagactacaactatctgtttgacccggtggtgcacctcaagcgctttttcgatgccgccggggactggctattcctcattgacgaggcgcacaacctgccggacagagcccgcgccatgtactcggcgcagtttgccaaaagcagcctgaccgaggcaaagcgggcgctgggcaagggcaaaagcagcctgaaaaccgcgctgaccaaggcggataaagtctttctggcggtgcgcaaggcctgcgcacaggctgcgccccgcacaggtgcagagcccgccggggaaaccgagcctacgcaggtgagccttttacccgctgaagctgcgccggattttgccctgccgcagccactgtacgcccgggacggcaccgtgtttttgcagcagctgcccgccgctttgcccgctgcgctgcgggcggtgcacaccccgttacaggactggctggaacagaaccccgaggaccccgcccacgcccagctgctggaactctactttgccttgcaagatatcacccgcgcagctgaccggtacgacagccattttgtcacccagcttaccgcccggggcagcgagctggagctgcatctgctctgcttagaccccgcaccctttgtggacgccagtctggcggcagggcgcagcgcggcgctgttcagtgccacattgaccccgcctgctttctaccgcagcgtgctgggctgcgccgatgcccgggcggtggcactgccaagccccttcccgccgaaaaatctggggctgttctgtctgccgggcatctccacccgctaccgccagcgggaagccagtgtgcccgccgtagccgatgcgctggcggcgctggcaaagggcaagaccggcaactatctggcgtttttccccagctacgcctatttgcagcaggtgtacgaggcgtttgccgcccgctggccggacattcccacccttgtgcagcagcgcagcctggacgatgccgggcgcgcggagtttctggcgcagttcgccccccaccctgccaacacgctgttgggctttgccgtaatgggcggcatctttggcgagggggtagaccttgtgggcgaccggctcatcggctgcgccatcgtgggggtgggtctgccgcaggtgaacccccggcaggagatgctgcgccggtattacgaggagcagtccggctgcggcttcgactacgcctaccgctacccgggcatgaacaaggtactgcaagccgccgggcgggtggtgcgcaccccgcaggacaaaggcgtggtgctgcttttggacgaccgctttgcgcaacccgacaccgcccgcctgttcccgccgcactggcagcacatccaatatctgcccggcaccgccgcgctggaaacggcgctgaaagggttctgggatgtataaaactgcaaaaggagttgttgcatcatgcgcaacaactccttttgctataaccttaatactccacgcctttccgtgcggcgatgcccttctggtaggggtggcggcggcagcacatctcagtgaggtaatctgcggcatccagcatccacgcgggggctgcgtgggcggtcaggacgcactcctgcccggcggggcggtgcagcaccgcctgctgcaacagggctttgtccaccatgtccagctcccacgcgctgccggcttcgtccagcaccagcatatcacagggctgcgccagcgccgccgcaagatttttgttttgcaaatcgcgggtagcggccttttccgcctcgttcatctgaaaaacgaatttctgcccggccttgcctcggtaaacggtggcgcccagctgttccagcagcgggatctcgccgctctgcccgccctttaaaaactgcacgatgaccacacgttttccgctgcccagcgcccgcagagcaagccccatggcggctgtggtcttacccttgccgtcgccgtaatacagatgcaaaaggcctaaactttccatcgtctttctccttttttggctctcccggttttgtaataaaaggcacccgcagccctgtatgcttagcagaacggctgcggatgccttgttatttatttatggtttgcttttactggtacagcgggaactcccgggtcaggcgcaggacacgctcgctgatctcgtccttcttttcctcatagtgccagatgcagtctgcaatgcagtccgcgatcacctgcatctcggctgcgcccataccgcgggtggtgacagccggggtacccagacgcacgccggaagtcacaaaggggctgcgggtctcgccggggacggtgttcttgttggcggtgatgtgcacgctgtccagacgctgctccaagtccttgccggtgcactcttcgtcccgcagatcaatgagcatcaggtggttgtcggtgccgccggataccagcttgaccccgcgctgctgcaaagccgcagccagtgcctgtgcattttccacgatcttacgggcatattccttgaactcaggcttcagtgcctcgccaaagcagacggccttggctgcaatcacgtgctccagcgggccgccctgcgtgccggggaacactgccgagttgatgcgcttggcaatgatggggttgttggtcaaaatcaggccgccgcggggcccgcgcagggtcttgtgggtggtggtggtcaccacgtcggcgtagggtacggggctctggtgctgaccgcccgccaccagaccggcaatgtgcgccatatccaccatcagatatgcgccgtagccgtgggcaatctcggccagcttttcaaagtcgatagcgcgggggtaggcagaagcgcctgccaccagcatcttggggcgcaccttgcgcacctgcttttccagctcggcgtagtcgatcacgccgtctgcgccgacaccgtaggagatgaagtggtagtttttaccggacatattcactggagaaccatgggtcaggtgaccgccctgcgaaaggtccatgcccataacggtatcgcccaactccagcagggcaaaatacacggcaaggttggcctgtgcgccggaatggggctggacgttggcgtactttgccccgaacagctggcaggcgcgccggatggcaatattctccacctcgtccacatagacgcagccgccgtagtagcgcttgccgggcagaccctcggcgtacttgttggtcagcacgctgcccatggctgccatcacggcgggcgaaacgatgttctcgctggcgatcagctcaatattctcgcgctgacgggtcagctcccgctccatggctgcgcccagttccgggtcggctgcattgaccatgccgatggtgtccatcatatccttgtacattttacttgcccctctccacaaaatgttgcagattctctcagcgcagcacccgcgcggcgtttgctgctgtaagataatcatagcagaaagcggcggtggcttcaatcctcttttcgccaaaaggcttgctttttttgtctgaagtgtttattatgtttgtataaaaatgcgctgtcgattttgtatatttttcaagtttcttcccccacaggtgaagcgaggtgttttgtatgaccattgccgaggaaaaacaggcgcagcgtaccgccggccgtgccgcccgcaaggcgctggatgcgccgcagcgcgccgccgccaacgcggcgctgtgccgccgggtgctggaactggacgcctaccgcgccgcctgcacccttttgctctacgcagcctttgggggtgaagccgaccttgccgccgtagctgccgaagccgcacggcagggcaagacggtagcctacccggtgtgcggcgagggcttttcccttaccgcagccgtgccgggcgcggacggctgggcggtgggtcagtacggtatccgcacgccggtgccggagcgctccacccttttgcagccggagcagctggatctggtgctggtgccctgcaccacctttgacgcaggctgccgccgggtaggcatgggcaagggctactacgaccgctacctgccccgctgcacccgggcggtgaagatcggcattgcattggaagttcagcgcgtcccccgcgccgccgtggacgcccacgaccagcggctggacgcctttgtaacagagaggggtatctacacatggaaatgaacgatctaagctgcgcgcagtttttggcacagcttgccagcaaagcgcccacgccgggcggcggcggcactgccgctctggtgggcgctgccggtgtggcactgggcaacatggtgggctgcctgaccgccggcaaaaaaaagtatgccgtcgtggaagcggacattcaggcactgaacgcccgggctgaagccctgcggctggagctggaagcgctggtacatgccgatgctgacgcctttgcgccgctggctgtggcctacggcctgcccaaggacaccccggagcaggccgcgcacaaggcttctgtgctggaagccgcactggacggtgcaagcgccgtgccgctgcaaattatggaaaagtgcgccgagggcatcgcgctggcagggcagtacgccgccaaaggcagcgtgctggcagtatcggatgcaggctgcgccgccgtgctgtgcaaggcggcattgcaggccgcaagcctgaatgtgtttattaacaccaagctgatggcagaccgcacccgcgccgccgcgctggacgcccgggcagacgcattgctggcagagtttgtgccctgggcagacgaaatcttcaccgccgtcagcgggaaactccgcaataaataatatcacaaatgagggaaagtatatggcaacgattttaaaaggtgcgccggtggtggccgccatgaacgagcgcaacgcggcactctgcgagcagctgaaggcaaaaggcatcacccccacgctggccgtggtgcgggtgggcgagcgggaggatgacctctcctacgagcggggcgtgatgacccgctgcggcaaggtaggcgtcgctgtcaagcagttcgtgctgcctgccgatgccacgccggagcagctgctccgggtactggatgaggtgaacactgacgacggcatccacggctgtcttttgttccgtcccctgcccaagcagttcgatgaccgcaccatccgcgccgccctgcgcccggaaaaggacgttgacggcatcacggacggttcgctggccggggtgttcacgaacacagagctgggctacgccccctgcaccgcgcaggcctgcatggagattttgaagtattataacgttcctctttccggcaagcgtgccgtggtggtgggacgcagccttgtggtgggcaagcccgccgccatgatgctggaccgggagaacgccactgtgaccctgtgcaactcccgcacccagaacctgccggaagtgtgcaagcaggccgacatcgtggtggtagccatgggcaagatggccgctgtgggcgcggactgcctgcgggcaggccagaccgtcgtggacgtaggcatccatgtaaacgaggagggcaagctgtgcggtgacgtgcagtttgacgccgctgagccggtggtggacgccattactcccgtgcccggcggcgtgggcaccgtgaccacctcggtgctggtaagccatgtggtgcaggcggcgtgcaaaaaagccggagtagaatgctgagaagatcattttaagacagagcaagcccggaaagtccgcagactttccgggcttgcatttttacgggcggaattgtaacgggtatcagccccgcacaaggagcagcagcagagccgaggccacacactgcagaatgagccagcgggctaccacctgctcatcactccagcccttgcgcttgcgcacatggtcgtggagaggggtcagggtgtttttcagtatccagatgtgcagaaaacgcttcaggctgatcttcaaaatgcccaagctgccgtccgcgatgaacacgatagccgccagcaggaaggcgaaggggtggccgcacttgagcgacagcatggcgatgaaaaagcccatggcgcggctgcccgcatcgcccatcagcaggctggagggcttggcattcaaccacaggtaggccagcagcgcaccgatgaacaccacgccggcggtggcgtaggtgcccaactcggtcttataggccagcaggtaggtgccaatggtcaccactgccagactggcggaaaggccgtccacaccatcggtgcagttgactacgttgatgcttgcccagataaggataacgatgagcagcaggtacactgcatacggcagggtgaagctccactgcaaaaagtgtacgccgcagccattgaagttcaggtaggtgacgcccgccagcaccgcgatgacaaaatcgatgatgccttttttgtactcattccaggcggtttcggcggcatcgtccagatagccggagagcatggaagcgatcagcagcacattatacaccacatactcggtgttgaagggcagaaacgccagcgacaccagtgcgatgcacagtacaaagatcagtccggagcctcgcgccttgcccttggaaagctcgccgttcaccgcaaaggcgcggccgtggtcgtggggcagtttatcgcggaaaatggaatccgtcagggcggtcaggacaaatgccagcaaaaacgccatggcatccacgccccgctgcccgatgacagaggtcagcatttggatcataagataacattcctctttctttctgtatagtacgttgtgagtgtatcacgcccttgcccaaaaatcaatcccggcggcaaaattcactttggattgacttttctcccgcggctctctataataatgtattggtctgtaattttcacccacaacgcaggaggttccatgtccattacacttgagcagctctctgcccggatgcggcagggcgagcaggtgccgctgcgccataccgcacaggtggcgctgacgctgagcatcccttccattttgcagcagatcgtggtcaccgccatggagtacatcgatgccgccatggtggggcatatcggcgccgccgcaacagcctccattggcatcgtcagctccagcacatggctgctgcacgggatgctggccgggctgtgcatggcgttttccattcaggtggcgcagtatctgggcgcagaccgccagcaggacgcccgtggcgttctgcggcagtccatgctgttcaatctggcggtgggtcttgccgcagcggcctttggcgtgggcatcagccggtttctgcccgggtggctgggcgcagatgcggcactgcgggcaaatgcttcggcgtattttgccatctggtcggcttccctgccctttatcatggctatgggcacctacgccgccatgctgcgctctacgggtgatgcgcttaccccgggtctcatcagcatcttcacctgcgtactggacatcatcttcaactttttcctcatcaaccccacgcgggagatgacggtattcggccagaacctcacggtctggggtctgggctggggcgtaccgggcgcagcactgggcacagcccttgccaacgccgtgggcggtacgctggcgctgggcgttctgctgctgagggatggcccgctgtgcatccgcaagcccggctcgtggcacattacccgcgcctgcctgcacaacgtgtggaaggtgggcgcaccgctggcggcagagcgcgccgccctttcctcggcacaggtgcttctggtgcgcatcgtgtccgggctgggcactaccgccattgccgccaacagtctgggggtcagcgccgagagcctgtgctacatggcaggctacggcattcaggacgccgctcttgcgctggtgggacaggctgtgggcgcaaaccgccgggacatggcaaagcgctttgcatggctgtgcaccgccatgggcatgggcatcatggcactgaccggcgtggggctgtatgtgtttgccccgcatctgatgggtatcttcaccgccgacgccgccgtcattgcgcttggcgcacgggtgctgcgtatcgaagcctttgccgagccgatgttcggggcaagcatcgtagccagcggctctatgcagggcgcgggcgacagcaccggctgctttatcctgaaccttgtcagtatgtggggcgtgcggctgaccttggcggttctgctggctccccgctttgggctggtgggcgtatgggtagccatgtgcgccgagctttgcacccgcggcgcactgtttttgctgcgcatggcgcggggcaaatggctggataagggtgccttggcgtaaatttaccgtcgggtgggaagtttctccgaggaccgtccgctggggtgggtccctgccgccgcaggcggtagggcgggcgatggaatggcccgagtcgtgtccgaggaggaagcttcccgcctgatgactgtctataacaatcaatacaatcaaaaagccgaagcaaccttgcagttgcttcggctttttctatgcctaaagaactaagaaaaatcacttgcggccgtgcaggatgggagacaggggcttatagatcagcaggcacagcacggcgtccagcagacccttgaccagcgtgaagggcatgttgaagatcacaaggcacttgatcaggctgtcggcagagggcagaatggcctgatacatccccagaatggcttccagcggcatatggtagaactgcacataggccgggtaggtgatgaagtagttggagggcacgctgaacacggccatgacggctgcaccggcaatggcacccagaatggcggtcttgcggctcttgtggcgcttgtagacaaagcccgccacagcagagaacaccgcgcccagcataaagttgcacaactcgcccacgcaggcggtggaggtgcccttgatgatgatgtgcagcaggttcttcataaagctgatgaccacgccgtacaccgggcccagtgcaaaggcacccagcagggcgggcaggtcggagaagtccatcttgacaaaggacgggatgagcatcggcagcgggaactcgatgaacatcaggataaaggcgaccgcgctgagcatggcggcaacggtcagattgtgggtggtattctttttcatggtagttgtcctccccggggtgtactccccgttcaaatttgttcggaaagcccttttcgcgctggatcgaaccggaaagacaaaccaaaaagcgccctgctgcaaccaaaaactgcaacagggcacacagacgcaatttgcctgccgtttcttgcatccggactataccgttggtcccggagttgcaccgggtcagcacccttgcgggtggtcgcggactttaccgccagtggggaattgcaccccgccctgaaacgaactttctgaccaagagtatagcgcggtactgcggcgctgtcaagccccctttccaaaaagtttgcacattttttgtcaaagtgcgttttcacctttctttccttgccccgggcagcagagtatgctatcataatatgcgttgtgaaaaaacacaggaggttttccatgattttctcgatccgtaaccttggcttcgagcttggctcgctgctgctggaaggctgggcagcctttgccgcccgcgtggtgtgcgcggcgctgctgctggcgcttggctggctggcgcggcagcttttgtcccgcagggtgttccctgccctgctgcgccgcaactggcggctggccggtacgcccattctgctgcgcagctttgccgtaccgctgcagcggctcacccttgcagcgttcatctatgccgcagcggccagcctgccgtgggcaattgccggcgtaaataaatttctgctcacagtctttgagctggccgccaccttttttgtgtgtcaggggctgtacgccgccgccgatctcaccgaccttttgctggcgagctgcggcgaggaggtgcgcactaaccgcactctaaccaccctgctgaacaaggtgtacaaagttctcatcgtggttctgggcgttatgaccatggcacaggagagcggcctgccagtgggcagcatcgtagccagtgcgggtcttgtcggtctgactatctctctggccgcacaggacagcgccaaaaacctgttcagcgggctggtcatcctgctggaccgccccttttccatcggcgactggatcaccgtaggcgacgtttccggcgaggtggtggacatcaacttccgctccaccaaggtccgcgcactggacaactcggtgtacatcctgaccaacagcacagtcagctctgccaccatcaacaacggtactttgcgcaacaagcggctgtaccgcttcaccctcggggtcacctacgatacctcccgtcctcagctggaacagctgatgaccgacctgactgccatgctcaaggccagcccctacacctacgaggactcggtgctggttaagctgaacggcttcggcgcttccagcatcgacctgctggtgtccgcctacctgcgcaccgccgacatgacccgctttttgcagatgcagaacgacttaaatcttgacctgatggacgtgatgcagaaaaacggcgtggacttcgccttcccctccaccaccgtgtatctggaaaagaacaactgaacttttttggagggctccttcctatgacacagcttttgctgccaattatttacctggcctttatcagccttggcctgccggattctctgctggggtctgcatggcccaccatgtacccccagctggacgtccccttctcctacgcgggtatcctgtccatgatcatctcgctgggcaccatcgtttccagcctgaacagcgaccgactcacccgggcactgggcacgggcagggtgaccgccctcagcgtgggcatgaccgctgcggcgctgttcggtttctcggtctccggccagttctggatgctctgcctgtgggctattccctacggcttgggcgcgggcagcgtggatgccgccctgaacaactacgttgccctgcattacgagagccgccacatgagctggctgcactgtatgtggggcgtgggcaccaccatcggccctgtggtgatgggcgcggcgctttccggcgggctgagctggaacagcggttaccggtacatcgccctgttccagatcgcactttctgccgtgcttttttgcagcctgtccctgtggcataaacgccccgatgccaccccggacggcaccgtacccaaggcgctgaccctgccgcaggtgttcgcgctgccgggcgcgaaggaagtgatgctttgcttcttctgctactgcgcactggagaccaccgccgggctttgggccagcagctacctgacccttgtgcggcaggtgcctgcccagacggctgccagctttgccagcctgttctatatcggcatcacggtggggcggggcgtctgcggctttctgaccttaaaactgagcgacgaccagatgatccgtctggggtttgcggtgctgggcatgggcattgccgccctgctgctgcccggggcgcaggtctttgcgctggccgggcttgtgctggtagggctgggctgcgctcccatctaccccagcatcatccacgccaccccggcgcatttcggcacacagaattctcaggccgtcatcggcatccagatgagcagcgcctatgtgggcaatcttgccatgccgccgctgttcggcgtgcttgccaacaacatcaccccggcgctcttccccttctacctgctggtatttctggtgctgatggcgctgatgcaccggcagctggtgcgcaaaacggcgcacatctgaaagggtccagcctgctaaagttaaagggactgccgtacctcatttggtgcggcagtccctttgctatttattcagttatttgtaaagaactgcgttcaaaacttattaagcatctttttcagctttgccagttcctctgcatcgcgggtatcatccagcagggtgagggcatcgttgaagtagttgcggtccatgtaggagtgggtggagtttgcgtgggcagccatagcctccagcacggcataaccggagcgcaccagcgggtgggtagcaggcacgctgccgccctcggccaccagcgcgaacttgctttccgccatatcctccagcagggcgctgtaagcgttgttggggtcggtgccgtggttctgcagaccctgatacagcagctgtgccacaaaacccagcgtagaagccgtataccagttaccattgaaattattggggttcgcggccttatcggtgaccggggagttgatcttgttggtcaggtacaccaccaccagattctccacagggtcgatcatggtcaacgtaccggtccagccctgatggccaatggtattggagggtgcctgcgtaccgaaataccagcagcgctggttgtcgccctcacgccaccagcccagaccccagttggcagcgtcctccttcttgggtgcggtaaaggcgtccatcacgttgcgggagaagtagcggttctcgccgtagccgccggtgagcatgacagaggccagttttgccaactcggtagcgttggagaacaggcctgcatggccggaaataccgcccatcgcgtagtagcacttctcgtcgtgcacctggccctgaatggtggcggtgcgcacgccggtaaaggagatggcaccatcacgggtgttgccgttcagctcggtagcggcgcaatcgttggcggcaaagccgttcagcaaggggttgtaggtggtgtgggtcagacccatggggtcccagaaggtctccttcaggaaggcgtccaaacccttgccggtgatggcttcaatagcgaaggccagcagcatatagtccacgtcggagtaaacggtcttggtgcccggcttatacatcagcggggtcttgaagatggacttgagggtcgcggcgcgggttgcagcgctgccgtcccaaccggagaagagcacgttggtggcaccgggaacggtcttttgagcgcactggtcaaaggaatcgttgtggtactgggggtctgcagggaagcctgcctgatggcgcaggatatcgcgcagggtcagttctgctttccactgcttgttgaccttcaggcccgggttctcgtagccgttgtaggtaatgtcgatggtgtcctccacaaaggcgctgcccagcaggtctaccagacggctgtccaaattggccttgccctgcgtgacgaggtactgtaatgcgtagtttgcagtgtacatcttggtgttggaggccagatcgtacagggtatcgttggtcacagccgggctgtcggtcttgggggtgccgtccggattataggagttcaccttgccccatgcgttctgatacactagcttgccgtttttcacaatggccatctgtgcgctggggaagccgttgttcacatcggcctgaatgatctgctccaacagctccagtgcatcgcggtcgatgcccacgtcctgcaggctgcccccctgcacggtggggtagcccacccgcacggtcacctttttgccgcggggacggatgccgcccacctgaatggtgttgcggccgttgatggtctggccggaaatatccacgttccacacgccgcctgccgccatggcagcggtgttgatctggcggttattgacgaacaggttaaagccggtcacgcccgcctcgggctccacgcacagcgttccctgccctgcgtagcccacaaaggtgtacatgtggttcatggccagtgtatcgtccagacccttccagttggggaacaccggctcgccctgccagccgccgctcacgctgccgcggctggtcaccttgaccgaggccgcctttttagggacgaggttcagggagttggtatcctccgctgcggcggctgcgggctcggcagcagaggctgccccggcggtgcacacgttgagcgccatcatgcccagaccggcaacgctgcccttcaggaacgttttacgggaaaatttggttgacatggtaaggtcctcccattctttttgccgcaatgcgacaatatacctgtattcgtgcttttttgtcccgcagcagcgggactgccttgtgccccgaattgtacgcgagacgaaacaaaatgtcaatcatgtttttatcttgtggcacaaagttttgcgtttctcagtttttcgcctattttggcacattgttttgcgttttgtttcaaattttcatgcgttttgtatacaaccagccgcaaaaatgcgtaaaaaaagccgccgcacaaacccttgtgcagcggcttcggttcataatttttcttacaggatgcgggcgctgatagcgtttgccacctgaaacaggtccttctgcccaataaagccaaacttggcctcgtggccgtccgcaaagcagactgtcagctgggacgcctgcagcggatcgccaaaacccgccgtctgaatgccatagtgcagcaccttgcggtagggcagcacaaaaagctgctgccgcgtgcccgtgaccccctgcatatccaccatgatgatgcggtggctggtgaacaccacctgatcgcgcaccgtcttgtatgcgcccacgatctgctcgccctccagcagcagggcgttaacatttttgcagatatccttctcctgcaggcgcatgaggttctccatcggtttatcgcggaattccattgtagcgttcccctttcagcggttttatggctctattgtagcatttccgccgccggtttgcaagatgactgcccagtgcaggacaaaaagaaaagacccggaccgttcaaggttcaggtcttttggagcgggtaatgggaatcgaacccacctcctcagcttggaaggctgatatactagccgatgtactatacccgcaattgcagaaagaattataccataactttccgcaaatgtccagcatgaatttagcagctgcatagctgggcagacacagcaaaaaagcaccgcacattcctgtgcagtgcttttctttctggtggagattaccgggatcgaaccggtgacctcttgcatgccatgcaagcgctctcccagctgagctaaacccccagatgcttggcttcatgcctgacgacatgggttattataccagctggtgggacgcttgtcaacggttttttacaaaaatctctcctcttttttcagcggtgcagtgtacccggaagcttttgacgctgctgcgtttttcccgggctgctctgctgcaaaaggccgcagcattacctgtcccatttgtcgcacagagcgttgatctggtcggcaaatttggccagatccttgttggcgccgccctcgttgtgctcaatgacccgcagcaggcgcttgccggcgctgagcagccgctggaacacggtagcggcgcggtttgcaccctcgcctgtcctctgctccacacggacctttgtgccctcctgcaggcagactgcaccctcggcaccgatggcccactgcgcaccattgtagggtgcacaggcggtaaagccctgctcggtcagggtgtccacaaagcggttctccacctcgtcctcgccgtggatcacgaacacccgccggggcttttccgtaaaggcgttcacccagcgcagcagaccgtccttgtccgcgtggccggacatgccggtcagctgacagatctcggcctttacctcgatgggctcaccgaacagcttgaccgagtccaccccttcgatgagggtgcgacccaaggtgcccacggcctgaaagcccacgaacagaatggtacattccggccgccacaggttgtgcttgaggtggtggcggatgcgtccggcttcgcacatgccgctggcggacaggatgaccttgggcgtgcggtcggtgttgatcatgcgggagtcatcgctggtcacgctgatgcgcagccccggcacgttgatggggtcgatgcccttttccagcagcgcacgggtctgggcgtcaaagcagtcggggtctgtatcccggaagatgcgggtggcttcggtggccagcgggctgtcaatgtagaccgggaagttgccgtgtcccttgaccagccctttttccttgatctcccgcaaaaaatacagcatctcctgtgtgcggcccaccgcaaagctgggcaccaccacgttgccgccccggtcaaaggtgcgctgcaagatttttgccagctctgccacatagtccggccgggggtcgtggttgcggtcgccgtaggtggactccatgaacacatagtctgcctgttggatgtaggtagggtcctttatgatgggctgattcagattgccgatatcgccggagaacaccagctttgtggtggtgctgccctcggtgatccacagctctatgctggcagagcccagcaggtgccctacgtccacgaaccgcgcttcgatgcccggggcaagctcgatacgcttgccgtactccacaccccggaacaggcggcaggcggcctcggcatcctgcacggtgtacatgggctccaccggctctgcgccggagcgcttgcccttgcggtttttccactcggcttcaaactcctgaatatgcgccgagtcccgcagcatgatgccgcacagctccacggtggggatggtggcgtagatcctgccccggaagccgttgtgcgccagcagcggcaaaagaccggtatggtcgatatgggcatgggtgatgagcacaaagtcgatctcgccgggggctacgggcaagggctggttttcgtacacattcttgccctgctccatgccgtagtcaatgaggaaacgctgccctgccgcttccagcatggtgcagctgccggtcacctcgtggttcgcgcctaaaaatgtcagcttcaatgcaaaacacctccggttcgttttatggttttagtatagcatatttttaaggtacacgccgcacaaatctgcgggaagtttacgggcataatgctgaattgcagaaaaaatttttatacaatcttgacaaaccaccctgttctgttataaacttaggattgtatgacgttcgttcgtattttatgagtctttttaaatagagaggtagaaatttatggttcgtaacgatttgcgcaacgttgccattatcgctcacgttgaccacggcaagaccaccctggtggatgccctgctgcgtcagagcggcgctttccgcgacaatcaggccgtggccgagcgcgtgatggacagcggcgatatcgagcgtgagcgcggcatcaccattctggctaagaactgctcctgcacctacaagggcgtcaagatcaacatcgtcgacaccccgggccacgctgactttggcggcgaggtggagcgcgtgctgaagatggtcaacggcgtactgctgctggtggacgctgccgagggctgcatgccccagacccgctttgtgctgcagaaggctctgcagcagaacctgagcctggtggtggctatcaacaagatcgaccgtcccgatgcccgcatcaaggaagtcatcgacgaggtgctgtacctgctgatggatctgggtgctaccgacgagcagctggagtgccccatcctgttctgctgcggccgtgacggcaccgccagcctggacccggatgtgccgggcaccgacctgatccccctgttcgacaccctgctgagcaccatcaagccgcccgagggcgaccctgaagctcccttccagatgctggtctcctctgtggactacaacgagttcgtgggccgcatcggcatcggccgtatccagaacggcgttgccaaggtgggtgaggaagtggtcgtgtgcgactggcacaaccccgacctgaagatgcgcggccgtctgaccaagctgtacgacttccaggccaacggccgtcagccgtgcgacaacatcaccgcaggtgatatcgtggcattctccggtctgccggacgtgaccatcggcaacaccctgtgcagcccctccaacgtggagccgctgcccttcgtcaagatcaacgaccccaccgtggagatgaccttctcggtcaacgacagcccgctggccggccgtgagggcaagttcgtcaccagccgtcagatccgcgaccgtctgcagaaggaactgctgaaggacgtggccctgaaggtggaggactccgccaccactgattccttccgtgtcatgggccgtggtgagatgcacctgtccatcctcatcgagaccatgcgccgtgaaggctatgagctgcaggtctctcccccgcacgttctgaccaaggtgatcgatggcaagacttacgagcccatggagcatgtcgtcatcgacgtgcccacccagtatcagggtgccgtcatgaccggtctgggccagcgcaaggccatcctgcagcagatggagtccctgggctctgaccgtgtgcgtctggagttccggatgcccagccgcggcctgttcggctaccgcaaccagttcctgaccgatacccacggcgagggcatcatcaaccagatctttgacggctacgatgtctgggctggcatgatcgccaaccgctccaccggttctctggtcagctttgagaccggcgaggccgtcacctacggcctgttcaacgctcagcagcgcggcaccctgctggtgggccccggcgaaaaggtgtacgagggcatggtcatcggctacaccgcttcaggcgaggatgtggacgtgaacgtctgcaagaccaagcacctgaccaacacccgttcttccggctccgacgacgctctgcgcctgatccccatcagcaagctgagcctggagggctgcctggagttcttggcacaggacgagctgctggaggtcaccccggagaatctgcgcatccgcaagcagatcctgaaccacgaccagcgcatgaaggccaagagcaagctgaagtaattttacaaaagcatccttattatagcagcgcagaagcacctacgggcgtttttgcgttgcttttttcatggctgacaaattactcagcattttttgcaaaaagggcttgcaaaagtgcggtgactgcggtataatatttttcgcagtcactgatatgcctctttagctcagtcggttagagcacctgactgttaatcagggtgtcgcctgttcgagtcaggcaagaggcgccagnnnnnnnnnngcgatggatattcttccatcgcttttttgtttatctgcatctttttcgccctttctttacggttcttaaaaaatatcgccttgaagaaccctagtggttgtggtatacttttataagtttataggcgtgaaaaaggtactgtgcaggctgcacagtcttttctacccacagacaggcgctccccggtcagaagactgccgtgcaggagcgcagttttttcgttggtcaaatcagcaggcaagccggtggtcttgtgcggcaaacgcagggcggcagggcggcttggtgtcgtttgaataaatcttgagagtaaaaggaaacatctatgcgttatacctacgtccggcagcacgataccaccgactgtgcggctgcctgtctggccatggtgtgcctgcactacaaaaaggaagttaccattacccgcctgcgggatatgatgggcaccgacctgaaaggcaccaaccttgtaggcctgcaaaaagccgccaatgaacttggttttaccaccgccgcagtccgcgtggaccgcgaaaactttctgagcgatttctcgcttccctgtattgcacaggtcatcaccgatcagggtctggctcactttgttgtggtgttcaaaaagaccaccatcaaggatgatggcgcacgccgcaagcatatgctgcaggacgccgagacccgcaaggaagaagaggaaaagggcaaaaagcataagtgcaaggattacgttatcatcggcgatcccggcacggaactgaaaaagatcagtctggacgagttctacaagaactttaccggcgttctgctgcttttgaaccccacctcggagttcaagggcggcaagattgaaaagggcggcatgatgaagcggtatatcaacctgctgctgccccagaaaaagctgttcttctacgccatcctcagttcgatcatcaccaccattctgggcatcgcgtcctccatgttcaataagatcctgatggacgaggtgctgccctacgggttgaacagcctgctggtcacattgatcctggtgttcagtgtggtcagcattaccagcacgctgatcggctttgtgcgccaatgggtgctgatccatctgtccatcaagatcgatatcccgctgatgctgggttacttcgggcacatcttcaacctgcccatgaagttctttgccacccgcaagaccggtgatatcaccacccgttactcggacgcaaacaccatcaaatctatctttaccagcatcgcgctgagccttgtgatggatatctccatggctgtcatcaccggcatcattctgttccgcatgaacgccatgctgttctccatctcgctgttcatggcgctggtcagcatccttctggtgctggtgtacaaacagccttataaaaagatcaacgaagagagcatggcacagtctgctgcgctgaacagccagatgatcgagagcctgcgcggcatcgagaccgtcaagtgcaatgccaacgagcaaaccgagctggataatctggaacgcgagtacatgaagagcctgaagatcagcctgcgctctagccgcatcagcaccacgcagggcctgatctcttccttcatctccaccggtttcagtatgcttaccacctacgtgggcatcacgcaggtgctgaacggcgagatgacgctgggcggctttatggccttcagcaccctgtccggctacttcacctcccccctgagcaacctgatcggtctgcagatgcagatccaggaagccagcatctccatgaagcgtctgaccgagatcatggactacccctctgagtacgagaccgccgagggtgtggagcagagcgagctggacaaggtggagggcgacatcgagttcaaggacgttaccttccgctacggcaaccgcgctcccgcgctggatcacatcagcttcaccattcccgccggtaaaaaggtggcgctggtgggcggcagcggcagcggcaaatccaccatcaccaaactgctgctgaagtactacgaccccgaggacggcgagatcgacataaacggcgcaaatctggccgagtacaccaacagttcggtgcgccgcgccattgcctatgtgccccagaacatcgagctgttcagtaagaccatctacgacaacatccgcatctcccgcatggatgccacgctggacgaggtgaaggaagctgccaagaaggccgatgcccatgagtttatccgtcacctgccgctgcagtacaacacctatctggaggaagccggcaacggcctgtccggcggtgagaagcagcgtatcgcactggcacgcgccttcctgaaggactctaacctctacattctggacgagtctaccagtaatctggactttgccaccgagacgctgatcttcaacatgatctacgagcagctggcagaccgctccatgctgatcgtggcgcaccgcctttctaccatccgtgactgcgacctgatccttgtgatggatcacggcaagatcgtggagcgcggcacccatgaggaactgctggcaaaggatggccgttatgccgaactgtggaatatgcagcagggcatcttccgcaagcgcaagtccgagcccgctccgcaggtaccttctgctgtggtggaagaggacgacgacggcgagtccatcacctactgaccgcaccgcatccgcagcctttgcccggatgcagcataagcgctttcccgctgggaaaccaaaaaatgcctcgttatggtgtgcccggaggcagacgcttccgggcacctttttgtttcggttcacattaaaaatataacaggattaggggtaatttatcatgaatgagatcaaagttgctgaaaacaagaccctcaagctgaccaatgtcctctcccgcctcgtgcgccctgaggaactgggcaatctgccggtcatcctgacccagatgcagaactttatgaagagcaacggcgcacagcctatcggcccgctggtgcaggcggtaaagatgggtaccggcccggatcatgtgccggaactgtacatgatgcagcaggctacccagatgatcacccagatggagcccggctaccacatggacgctgtgctgcgggtgaagaactgcctgtacgcccactacactggtccgatgagccacaaccagctggctaccgccaagctgcagatcatggcctttgaaaacgacatcaagctgaccggcgacaactataccatctatgtcaatcaggacgatgacgatgccgtgatcgacgtatttatggagaccaaataattatgacgacaaccattcagaacctttcggatctgcaggaccgccggatcatgatggacaaaaagctgcccccttacgggtacgcctttgtcattctgaccggtctgttcatgatttttctggtgatctggagcacccagaccaaccgcatctatgtcagccagaacagcggtgtggtgcaggccgccaacaagacctacatcatgtccagctactccggctccatcaccgagctgtatgtctctgagggcagctatgtgaatgagggcgacctaatcgcccggctgaagagcaccgatctggatatgcagaaggataacctgcaaagccagctggatatctaccagaagcagctggatcagtacaacaagctgctcaagtgcattcaggacgacaccaactacttcgacgagacgaatgccgaggaccagccctactactaccagtaccagacctacaaaagccaggtagcgcaaaagacctttgacgccaccacctatcaggctgccggttactccgacacccagatcaaggctttgatggagcagaaccagagcgagctggagtctttgtactactctaccatgcagtccatctcccagagcattaccagcgcacaggtcaacgtggataacctgcaggcgcagctggattccctgaacactggtgccaacgattacttcatctatgcgcccacctccggcgtgatccacatggacagcccttacaaggagggcatggtgctgagtgccggttctgcactggctaccgttgccagcgagaacgatgatctggagatcatggccatggtgacggtgaacgaccgccccctgctgcatgtcggcgacccctgcaagatcgccatcaccggcctgtcggagtattcctacggcacgctgaccggcacggtcacctccattgacagcgatgtgacctccagcaacaacggctcctactacaagatgaccatcaagcccgacgccacctatgtggtgagccgcagcggcgacaaggtagatctttccaacggtatgagcgtgaccgcccgcgtggaatacgatcaggtcacctattttgagtatgctatggaggctctgggcgtgctgttccgctaaaagcggattatgcagcacggcaggatgcccccttctacaccaccccaaagaggtacaaacaacatgattcgaaccgcaaagaaactggccgcctgtgtgctgatgctgggtgtgctggtatgcggcaccgcactgagcgctgccgcagccagtctgcccgttgaagagcagaacggcgtttcactgccatggctcaaggacgtgcccgccgagagcattgccaccggcagctactctgccaatatgctgctgggtgcttctcagcagctgtcccccgtggtcagccccagttacagcaccgactctgtggtctttttgaccgatgacagcagcgtgctgaccgtaagcagcagcggcgtggtacaggctgtgggcgttggtactgccaccgttacggcagcagccggcaaccagatctgcgcctacaccatcgtggtatccatggactcctccatgatcgtgaccgagatggatctttccctctcctccaataccatctatgtgggcaactcggtgtcggcttcgctgcaggtgcgccccagctctgcttccaactacgccactgtcaccctgacctcctctaacgagaagattgctacggtgaacagctttggccgtgtgaccggcgtagctcccggcaaagccaccattaccgcaacctgcggctcggtggtagccaccaccaccgttacggtgcttgccctgcccacggattcctccaccggcacaagcggcaccacctccaacaacagcggacaggtgatcacccccaacaccaactacatcgtgctcaagcccggtgccacccgcaccattacggccaaggccacccctgccagtgcatcccagtccttcaccttcaagtccggcaacagcagcattgccacggtcagccccacgggcgtggtcacggcggtaggcaccggttctacctccattaccatctccaacggcaaggctactgccatggtcaccgtcatcgtgaaccgctcggcagatgccgcctccggcagcgacagcagcaatgacggcacgaacaccccggacgacaacaccactatcccgctggaccctgtggtgcagaccattcaggacagcaccgaggatcaggtggtgttcgcccagtctgaggttcccatcgtgaccggcgagattctgaacgccctgcgcaccaccggcaagaccctgtgcgtggtaggcgatggctacaccctgaacgtttccggtaaggaggtgaagagcaccaccagcgagatcgacaccgccatcaccttcaccgagagcgaagaggggctggagtttgagctggataacggccgtacccttccctgcgcggtgcagctggaactggacgtgagcacctactcccgcctgtacctgtacaacaccatcagcaacaagtggcagttcctgaacagctacaaggacggcgtcatcaccgccgacactgccggccgctacctgctgaccaaccagaacctgcggttcggtgatatcaactggaccttcttcatcgcaggcggcgtggtggtgatcctcatcgccattgcctacatcgtgctcaagaagcgctactggttctggtaagctcctcttcccctgcatatacgaccgcccgctgcacagcatttcgtgcaacgggcggttttgtgttatagacgatttagaatggtctccgcgcggctccgaccatattcagagaaaagatgatttttactgtggttcagaaacgcctgtgggcggttctaaaccactttttcacaagaagagatgccctttaggggatggtttttcccgtgaaaaaacaagtctggaaaatccgcagattttccagacttgtaaaattaaaaaatattcttccgctaaaaatggtcagagcggaacggagaccattctaaatcttattctccccggtcactccactgttacactcttggcaaggttgcggggcttatccacatcgcagccgcgcagaacggccatatagtaagcaaacaattgcagcggcacgatgagctgcagcggcatcagaatgtcgtcatactcgtccaagcggataacctcggtggcaacgccctccggcacctccgcgtccttggtggtgaacagcagcacccgcgccccacggctgcgggtctccttggcgttggagatggtcttttcgtagacgtttttctgggtagccagcgcaatcaccggcacaccgtccgtgatcaggctgatggtaccgtgcttcaactcccctgctgcgtaggcatccgagtgcacatagctgatctccttcagcttcaggctgccctccagcgaaagagcgtagtcaaacccgcgcccgatgaaaaagcagctctgggtgttcacatagcggctggcaaggtacttgatctgctcgcagtccgcaaggcggggcttgatgacctctggcgcgtgcagcagctgggcagtgtaatactttgtcttttcctcggtcagctgcccccgcgcgtaggccagacgcagggcaaacaggtacagcacgcacagctgcaccatataggccttggtggacgctaccgcgatctccggccctgcgtaggtgtacatgacgtaatccgctgcccgggcaatgctgctgcccaccacgtttacaatggccagcaccggcacgccccggctcttggccagcttgagggcggccagcgtatcgctggtctcgccagactggctgatgatgataaccagatcttccggctttaggatggggtcacggtagcggaactcgctggcgatgtccacctctgcgggcacccgggccagcgcctcaatggcggtcttgcccaccataccggcgtgcatggccgtgccgcagcccaccagatgcaccgtgccgatgctgcgcagcttttcatccgtcaattccgggatgcgcagctccggcaggccgttctccacccgggggctgaccgttgccgtaatggcggcgggctcctcgttgatttccttgagcataaagtgggggtagccgcccttttccgcggcttccatatcccagtctgcggtcagcttttcgcgctccactgcctcgccgaactcgttatagaagcggatgccctgtgccgtgcacacggccatgtccccttcctccagcacgctgtagctgcgggtgtacttgagcagcgccgggatatccgaggccacaaagttttctccctcgccccagcctacgatgagcgggctttcccgcttgaccgcaaagatggtgtccgggtagtccttgaacagcaccgccagcgcatagctgccccgcaccttgtcaagcgcagcctgcaaagcctgtaaaggctcgccctgatagcagctgtcgatgagctttaccagcacctcagtatcggtctcgctggcaaaggtgtagcctttagcaatcagacgctcctttaaagcgccgtagttttcaataatgccgttgtgcacgatgctgacccggggcgtggagtgcgggtggctgttcacgtcgctgggctcgccgtgggtcgcccagcgggtatgaccgatgccacagctgctctggggcagcgccagctcttccagcttactgcgcagggtggaaagccgccccttgcttttgaccacgcggataccgtccctctgggtaagtgccacaccggcagaatcgtacccgcggtactccagcttttccaagccgtccagcagcacctgctgggcgctgcgcatgccaacataacctacaatgccacacatacaaaatacctccagaccgactgcggcgcgccgaaatgcgctgctgcacagtcagtttcctctatcaaagtctatgttcttgtatggctttctttgcagggttctgtttcggtattgctgccggtttttgccctgttctgcggctggtatagccctcagccggagaaacacccgccgaatctttcgatgattcctctcctcgtcaccctcacggctgtcacccgtgtggcccggcgctttacgtcagcttgtggtacacattccttctttcaatgttttgtggttcagtgcatccccagcattttatgcagtttgggctgccacttcagcttgtacagcagcagtagattgcacagtgcgcggtcatacagggcaaaggccacgttgcccatgcccagtgtgagcagggacattgccagtgcggtggtgcgcagctcctgcgagacgctgcccgccggtaccagcacaagcagcagaccgtacatggcaagcaccgccgcgttgcacagcagcagcttacacaccagctgcaatgcccggggacggatgcggtcaaaccggggctttaccagcgggtaatagcccagcagcaccgtgaagatcagggcgatctccttatccggcacaaagagcagccccagcaggctgacagcggcgtacgccgtccacgccatggtgatgccgcactccatgcacaccgttgcaatgagaaagctggccaccgcaggcgcgatgaacatggcaatggggatgatggtgcccagcagcatcagtgccacgcacagtgccgctgccatgccgcagtaggccatggaccagcttttgctttttcgtttcttcatgggatctcccatttttcggtatcggcgtcctgctccagcgggtagaccgcgtgctgcaggcctaggatcatgatattgttcagcagggtgtcgttcagcttgagatccagcatcttgtacgcccgcatcagatcattgaccgctgccagcgcctgccgccgggcgttctctatggcggcagcctgtccgttgagctcattgaccacgaacacgttgtactggccgttgcggcggtcggcttcaaagcgctcggccttgtccagcagatagaagatgcggccgatgcagctgccgatgtaccgcatactcttgcgctggttggggtcatccgtagccagcgtggagtacaaagcgccgtagacattgctcataggctcggcagcaagggcgtagtttttggcgctcaggttcatctgcaccaccgcctgctcccgctcctgcgcaaacagccgctccagtgccgggttctcctgccgtgctttgtcgtaggcgcggcgcagcagcagcttgtccactgcgcggcgcacgcgcttcgccgggcgaagctcgctgtacttgcggtcctgcaaattatgccagcccatcaggatctccgtctgcgccgcctgccggatgcccagcgtctggcacatcatgctgcgctggaacggcgtaccgggcacccgctgccgtttgcaggtgggcatacgtcctgccagactgtcggataggatggcaaacagtaccccgttggtgcgcagcagatggcaggcgtagaagccgtaagacttatacatctgccgccgcaccccgcggaggtaacgcatataggtattgtagtcccggatcgtcagttccggcagatagggccgcatccgtcccttcataagagccagccatcctttctgtacagtttttgcatcctgcggtcaataaggttagtataatcctttttatgcgccagcgcaactaccggatgcaaaaactgccgtaatttgtcattatgccgaattttgtgaaatctatttttctattaaaaacacccgcagaccgtctcttttcagcaaaagatgatctgcgggtgtttgtgccggattttcccgaaaaaagacacactttttcagtgcaatgtctgccgagagcggggcttaaatgcccttacttcttttcaaaatgggtgcgcttgccgtcaaagccggatttgggcatgggctttgccatcttttcggtcttgggggcgttatagtacatatacagctggcaggggatcatgccgttgtacatcttgcggcgcttgttggcgcgcttgccgtagtgcagttcaaagtccatatcggcggtaatggcatacagaccggcgcaggggctggcttccatctgctgtcccagcgtgcgcgctagcttggcagcgccctcaatagtgcccagacgctcaccatacggagggttcgtcagcacgatggcctccggctttgcggcaaaggtggcaacatcggccacttcaaagtggcaacggttttccacaccggccagcttggcgttgacgttggcctgtgccacggcggcggggtcgatatcgtagccgaaggcctcaaagcccacgtccagcttggactctgccagtgccttctggcgctgctctgcccacagggcagcgggcacaaagctgtaacgctcggcggcaaagcggcgcttcagacccggggcgatgttcatggccttctgtgcggcttcgatcagcaacgtgccgctgccgcagaagggatcctccaccagactgtcgcggcacacacggccaaggtcggcgatggtagccgccagcgtctcacgcaggggggcttccatggcgttgcggcggtaaccgcgcttgtgcagaccctcgccggtggtgtccagcatgatctcgcacacatttttgcgcagcataaagcgtaccttgtactccacgccgctctcgggcagcacggtggtgcggtggcccttcatcaggcgcttgaccaccgcctttttgatgacgctctggcaggcggggatgctggtcagctggctgttcagggaggaaccggtgaccgggaaggcggcgtccgtaggcagaaactcctcccacgggatggaatacacgccgtcgaacagctcgtcgaaggtggtggccttgtagcgtgccagcagcagcatcacgcgttccacggtgcgcaggttgaggtttgcggcggcgatcatctctgccccgccgcagaagctcagacggccatcctccacccggatgttctctgcgccgatgcgggtcagctcaaatttagcggtggattcacacccaaaaaagcagggggcgatcagttcaaattttgcgggcatggtagttcctttctgttctgtaccgaaaaaacagacctgtccgaccggggacaggcctgcctgtgttccttgtgatcccagctgatacgatggctcagcggccacggcggctgcggggcgcataaccgccgccacggcggttgttggtctcgtgatcgaggtccgccattttttcctcgctctggctcttgaagcggctcatcatgtcctcaaagctcagattgtcggagcgtgtgggtgtcttgggctgccacacacggggcgcagcctcccgggcagagcctctgccgccctcacggggggcacggcctgcgccgcgcccgccaccggagcgtccaccctcctgcccgccgcggaaaccacccggacgggggcctgcggggtggccttcccggggctgacgcggaaccgggggcaacagacgcttgatagacagcgcgatcttgccgtccggtgcaatgttgatgacctgcacctttactgcatcgccatcgtgcagcaccgtgttgatatcctgcacgaactcgttggatacctcggaaatgtggaccatgccgacacgcccctccggcagcgcaacaaatgcgccaaagggctttacaccggtcacgcggccttcgaatacgttccctacctcaattgccaaaactcaatactccttgttttccaaatactctcgacctgccgcgcggtcagttaccggtcacatccacaaagatgcgctcgttgggtgcggcgtagttgtaagagtcgcgtgcgacccattcggtgatctggtcggcatcgccgctcagtacgcgctgcagttcctgattttccgtctgttgctgcgccacctgttcgttcagtgtttccagttctgcccgcttggagctgatggtgacctgattggagatataagccgccagcatactcagcaaaagcagcacgaaaaacaggcggaacgccatggtgaccactgcattttttctgcgctttttgcgtcccatattcgtcattgccttacgctcctgtctgaacagcagaccttctgcgtctgttctcttactttgatacgcttgaattatacaacaatgcccgccggtttggcaagttctttttggatttttttgcggttctttctgcgttccggcgtaatttgcgggcagttttagccgcagcgcggcggcggcgcacaggctgcaccgcaaaacggtgcaaaatacggccgggcaggcgcaaagcagcccgtatcccccgccccagcgcccgcaacgggacgcccagcaccccggcaacgcaaagggcggcagcaaaggctgccagcaccatgtaccaccgcagcaccccggcggcgctgtacccggcggcgtagctctggcacgccagcagcactgcgccggaaagcagcatatccggcacaaaagccgtcctgccacgcaccggcaaaaacgcccgcaccacgccaagagcagcgccaagagcagcacaggcggcggcttcctgcaagagccgggcgggcagcagcacctgcaccatcagcgcagcagccggtgccagaagctgccggctgtgcgggcggcggtatattccagcccatcgaaccgcccggtcagcttcgcttccccggcttccagatccagtgtctgcatactgatctgcgcaccggacagatgcagaatgcccttgccggtctccaacgcggcactttcggcgctgcaatgcagcacccgctgcaccccggtgacggtcagcctgctgcggctctccaagatcaggtcatggggcagcggcggctttgcggcagctttttccataggcagtccccctctgccagcattgtatgcgggcaggcagggcggttattccgcgatcacctcgtacatctcgcgggcaacgtctttcgtgcgaggctccacatccgagagcacccgcaccttgatgggacggttgccgaaggtgacctcgatgatgtccccggcgttgacggcctgactggccttggccaccttgccgttgatgaggatgcggcctgcatccgccacctcgtttgccacggtgcggcgtttgatcaggcgggagaccttgagatacttatccagacgcatttagagttgttcctttcctttcagcaaaaaagccgccgcaccttgtgcaggcagcggcggcgtgacagaaccgattacagggtgtccttcagggacttgccgggcttgaacacgatgctgcgggaagcagcgatggtgatgggctcgcgagtgcgggggttgatgccctgacgctcggcgcgctcgcgcacctcaaaggtgccgaagccggaaatggtgatcttttcaccctcggtcattgccttgcccagtgcctcaaaaacagcgctgacagcctgctctgcgctcttcttgctcatttcggtgtttgccgcaacctgtgcgatcaagtcggtcttggtcatattatttgcctccatctgatttgtcttaaattctctcgttctatcggagcaggtcattcgacctgagtaccgctttgtttctgttccagacactgctgtgcaaagcgcttggatgcaaaggtcagcgcttcctctgcatccacccctgcaagccgggcggcgttcactgctgcaaacagcagctggcctgcggcttcctgctttgtagtgtcctctgccttgccaaaagcctgcacggcggcttccagctgatgctgcgctgcggctgcatcctgctgcccaaggccgtgcccggcggcacgcttttgcagcttctgcgcccgcatgagcgcgggcagcgtagcgggcacggtagccagctcgtccgcaagggtagtgcgccccttttccttatttttgagcgcatcccagccatttataccagcgttttcctccgcggaggacgcaaagatgttggggtgccggaacaccagcttttcgcagacgttgcggcacacatcctcaaaggtaaagcgtccccgctcttcctccatggcggcgtggaacaccacctgcatcagcacgtcccccagctcctcccggagcagaacggcgtcatctgcgtcaatggcctccagcgcctcgcaggtctcttccagaaagtttttgcggatggacgcatgggtctgcaccttatcccacggacagccattttccgggtcccgcaggatgcggatcacctgcagcagctgctccgccgtatagggcggctgtgggttccagtccagcacacgttccatctccttttgaaaagatactgtaaattgtaccgcagctgttgcggtttttcaagcaaaaagccgcaattttccagcatttttcatggttttctgcgcttttcacaaaaacaggacggtgtcctgtgggggataccgccctgttgcagcttttttccggttaccggcttacagctgtgcgccgcacttattgcagaacagtgcatcgtccgagacgggcgcgccgcactgcgggcaggtcttgcgggcaggctgagcgggctgttccggggcagcttcttctgcctcctccatgggggcttcgtagtccacctcggcggcttcggccggggtcaaggtagccttcaggcgggtgatctcctgctcaatggtatcgatcatctcgatgtatttatccaccagcggctggttttcctccttgcccttggcaaggctgtacaccagtgcgcccagctgacgctgtgccttgagcagctttccctgctcgttgaccagcagcgcctgcgtcttgcccttttcagccagatccatggcagcgttcttgcccttttcggcatattccagacctatcgctttgatcttgttaaaatccataaaagacacctctcttattctggcagtattctctgcagactgcggcgcacagtgcgccataccggagtcgtattcccattatagcgcagcgttatggcaattgcaacgaatgcaccgcaatttttacagtttggtgccggtttggaaacaaattttacgcatttttcacttgtcaggtgcggctgccgtagaactcgcgcagcatactgtcggcgggcagcagctccaacggcagcggatctacctgctcgaagcggcgggcggtctcgtcccacagctcggcgttgtggccctccagcgtgaactgacggcgcacctcgcccagcagccgggagatcagtcccagctcgtaggtaaaggaagtgtccagcaggaagtctgcggtggtcttgaagcccttgatataccgggtctcgccgtccagcaccctgtcccacatggaaagggtcttggcggggctgcggccccgggctgcggcatcccgcagggtgcggcggcacaggcggatatcctgcgtattgatgacccggcggccgtcaatgcagtactcctcccgcagaccggcgtagatgcggtagatctggtcatccggcacaaggccggtcagttccgggttgagggcatggatgccctcaacgatgcacacaccgccctgcaggtcgatgggttccaccgcggcagcgcgctgctcggtggcaaaatcgtagatgggcagttcggtcttgccggtctcgctgagctggtgcaggcactgcttgatgaggggcagatccagcgtttcaaggttttcgtagtccagcgtgccgtccggcattttggggtagtaggcagcacctttaaaaaagttgtccagactgaccacctgcgccggggtgccctgctgcaccagagcctttgccagacagtgggcgctggtggtcttaccgcttgccgaggggccggtcagcataacgatttttgccccggagccgcgcaccttctgggcggcatactgcacccgccgggcgtagctgttctcgctcagctgtgccagcgcctgcggactgcgggctgctacattatacaggtctacttcaaccagtcgtttcggtacccagattgtgatcataaaactcagccactccttttttccgttccagtacctccgcaaagcgctggatatactcgttcggatacttaaaattgaagatgcgctgcatccgtttgcctccatcggccaccagtttggtgctgccgcccgcaccggccgaaaggatggtctggacttcctccatgatatagatattatagtaaccctcgtgacccggcttgcaccagcccacgttttccagattttgcagcgtattcttctgccggtaaaggtaataagggcggtagcccgcctcggccagcagatggcacttttccagcatggcggctacgtctgcgtagtcgttttccttctgatcctcgatgacgatgcgggacgcccgcttgagggtaagggtgtggacggtgatattctccggctgcaaggcaatggcctgccgcaggctgtgctcaaagccctccaccgtatctccgggcagaccggcaatgaggtccatgttgatgtcctcgtgcccggcgcggcgggcatcggcatagcaatccagaatgtcctgtgccgagtgcttgcggccgatatttgccagcacttcgtccgagaaggtctgggggttgatggagatgcgggtagcgccgtattccttgatgaccgccagcttttcggcgtcggtgcaatccgggcgacctgcctccacggtatattctacgaccttgctcaggtcaaaattctcccgcacagtgcccatgagttgccgcagctgggctgcggaaaggctggtgggggtgccgccgccgatgtagatgctgcacaaggtcagccctgcacgctcagcctgcgcccggatctctgcaacctccttgcacaggcagtccacatagggctgcaccagcttgcggtcgcggtccagattgcagctgacaaagctgcaatagctgcaccgggagggacagaacgggatgccgatatacaggctatacgtcttgggggcgctgcccagccgcaggatgggctcctgcaagtcggcaatttcctttgccatttcgtatttttgcttcgagcagtcaaaccgctgcaaaaagaagcggtcgatctgctctgcgctccacccggcggcgcgcttatcgtggataagccgcaccgggcgcacaccggtcatcttgccccaaggcgggcggatgcccgtccactggcgcagcaggtcataagtcaggctggcaagggcaaactccggcgtttcgccgccctgctccaccggcagcggcagcggagcttccaacgttttgctcttttccccctgccgcaccagcacccgcagaccggtatcggtcttttcagcccacagacagtcctcggcaggctccggctgggtcagggtcaagggtgccatggggtaaaacaggcgggcaagatgctccacctcgtacccggagggcagcccagtgatatagatcttcatgtcgttctctctttaaaaaatgtcgttgccgccgcgcagggcgctgcggatatagtagttgttgtccagctccgcgccaaaggtagaaaattcgccatggccgggcagcacctgtgtttcgcgaggaatgggcagctgtgccagcttgcgcaggctgtccgccatctgtgcgctgctgccgccctcaaggtcggtgcggccgatgctgccggcaaacagcgtatcgccgcagaacagatgctcgccgcacagcagcaccacgctgccgggagtgtggccgggggtgtgccacgcagtaaagtgcagctcgtccaccgcgatctgctcgccttctgtatagctgcagtccgcagcggaaagcgggtacatcctgtctccggcaaggtctgccttttcacaatagagggtggcgttccactccgccttcagggcggcggcgctacccacatggtcgtagtggccgtgggtgcacagaatggtggtaagggtggcgttgtgctgctttaagatttcgtcgtagctgtgcacctctgccgccgggtcgatgaccacagcatggcccgcatcggagatgagcagaaaggtgttggtatacagcggcggtgccgcaggaatgtgaaaaccttgcatcgttactccttctttttccactcgtcggtatcaatgatgatggtgcaggggccttcgttcaccagcgacacctgcatgtgcgcgccgaactcgccgtgctgcacgtccttgaggccgtgcttagccatctcggcaaggaacagctcataggcatccaccgagagcggcggctttgcggccttgataaagctgggacggtagccctttttggtgtcgccgtaaagggtgaactggctgaccaccagcgcggaatagcccagatcccgggcgctcaggttcagcttgccctccgcatccgggaagatgcgcagacccgcgcatttatcggcaagttttggcacgatgtccagcgtgtcagtatccttgacccccagcaggatcatgattcccggcccgatagcgcggggttcgccgccttccacccgcacgctggcggaggaaacggcctgaatgactgctcgcattgcgttaactccttgtcaccttgagcacgtcccgcaccttggaaaggcgcgccaccacacggttgaggtgctcggtattgttgatgccgatggtcaggctgaccacggcgcagttgttttctacctgacgggcgttcatggcataaatgggcacccggatatcggccagtgcgctgagcacgtcctgcagcagctcgttgcggttcagggcaatgatctccagcccggccttgtagctgtccttgacgctgtctgcccagtaggccttgacccagcggggagcgttggaggggtccttcatgctggcaacggcgttggcacaggtctgcttgtggatggaaacaccaaagccacgggtgataaagcccacgatggggtcgccgggcagcgggctgcagcacttggcaaacttgatgggggtgttatcgaagccctccaccaccacgccatcggtggcgtgcacacggctcaggtctaccttgggcagatcctccaccgacttattttcctcggcttcggcagccttgagcttctgccactcttccttgagcttgggcaggcagttggcaatggtcatgccgccgtagccgatggcggcgtacagctcctcggcgttgttctggcgcatccggcgggagcagccgtcgataaaggcatccagctggtcgtccgggatgaggatcatctcccggcgcagctccttggacaaagcgtcccgtccctgctggatattctcttcccggcgcatcttcttgaaccagttgcggatcttgctcttggcttcgctggtgcgcacgatcttgagccagtcgcggctggggcccttgtctgccgggcccagcagcacctcaatgatctcgccggtagccaccacatggtcgatgggcaccatgcggttgttcaccttgcagcccaccatgcggttgcccactgccgaatggatggcgtaggcaaaatcgatgcaggtagcaccggtgggcaggttgatgacatcgcccttgggggtaaaggcgaacacctcttccggcaaaaggtcgctcttcagatcgtggagcaggttgccggaatcctcgctcaggcgctggttttccagcagctggctgacccacgccagacggtcgtccagcttatcgtggccttcgcggccctccttgtacttccagtgggcggcaacgccgtactcggcctgctcgtccattttgcgggtgcggatctgcacctcaaagggaatgccctcgtgcccgatgacggtggtgtgcaggctctggtagccgttgggcttgggggtggagatataatccttaaagcggttgggcagcgggtggtacatatcgtggatgagaccaagggtgctgtaacactcggccagagaatccagaatgacacgaactgcatagatatcgtagatctcgtcgaaggacttattctgcatgatggtcttgcggtagatgccgtagatactcttgacccggcgcttgatggtggcaccctcgatgccgctttccaccagacggcgctcaatgacaccggacaccttgatcaaaaactcctcaccggagcgctcgctgagcatccggctaatctcggagtagcccacagggtccagataatgcaggctgcggtcctccagctcttccttgacgttcaggatgccaaggcggttggcgatgggggcgtacacctccatggtttcgcgagccttatcgcggcgcttctgctccggccaagcgtcgccggtgcgcatattatgcagccggtcgcacagcttgatgatcatcacgcggacgtcccggctcatggccagcagcatcttgcgcaggttctcggcctgcaattcctcaatattggagaactggatcttggtcagcttggtcacgccgtccaccagtagcgccacttcctcgccaaaggcggctttcaggtcgtccagcgtggtgggggtatcctccactacgtcatgcagcagggcggcggcgatgctctcggagtccatgcccagatccagcaccagccgggcgactgccagcggatggcagatatagggctcaccgctgcggcggcacacgccgttgtgggcgttgttggccagctcgtaggctttttggatcatctccatattgtaggctttgccgctggcctgaatggcctcgcacagcttttcccacgttacgatctccgggcgcacctcagagggcagcgccccctccggtgcgtctgccagcagtgccgtagcggctacggtggcggtctcctgcaccggctggtgcagatgggtcttggcagagtagccgtcttcgtcccgtaccggagccgggaccggggcagtatttttctttccctcaggcatttatagttcctccagacatttcaggatgggggcatcggcaaggttctttttgcctgctgtcggcaccagctcccagaattttgccccgcctttttccgctgcggtgatcagccccacctgctctaaagcggcaactgccaccagcgttttgccggtctgctcctcccccagctttgcgcacaggggctgcaagtcctcggcgtgccagcggcgggactgcagctcccggtacacggcaatgatatccgtgcgggcaggggcgatctgttttttctgttcttcggtcaggggggtgccccggcgcagcgcctgcaccagtgcagcctgccgcgccagctctgcgcccagccctgccgggtgcaggtcgatgatgcggccggagagctgcgcccctcgggcggactcgtagaccgaaaggttcagtgccgcgtccaccacatcgcccagcgcgtagggcagctgctcggcgggcatcccgaaccagacggcgtacaggcagctattgccctgccgcagccgcaggcggctgtgccgcccctccgataccgggtatacgccgtccaccacggcactttgcagcaggaacaccggggtggggttctcggctccgtagggtgccagctgctccagatgccgcacgctctccaccgtgatgcggtccagatgaatggtcacatcacaggtaaggggcggggtgtgcagcaccgggcattcccgggcagcccagtcgttcaggcggcggcgcagctcgggcagattttcttcccggacggaaagtcccgccgccatagcgtggccgccgtagcgcaccagaaggtcggcacaggagccgatacaggcgtgcaggttaaagccctgcacgctgcgtccgctgcccttgccctcgccgtgctcgtcaatggtgaccacgatgaccgggcgcccggtgcgctccaccagccgggaagccacgatgccaatgacgccgggatgccagtcccgtccccacagcagcatgatgcggtcgtccagccgctcgggctgctgttccagcaattcctcggcggctttgaagatctgctgctcggtctcctgccggtgggcgttgatctcgttgagtttatgcgccagctcctcggctctgtccgggtcctcgcagagcaccagctgcaaagcggtaacggcgttatccatgcggcctgccgcgttgatgcggggtgcaatggcgtagctgatattctcggcggtgataggcttgcccgcaagaccgacttcctctaaaagtgccccaaagccggggcggtcggtctgttgcagctgccgcagcccggccttgacaagggtgcggttctcccctaccagcggcatcacgtctgccacggtgcccactgcggcaaggtcgccgcagtaatccagcatctcctccggcgggcagccgtccagcgcagcgcagagcttgaaggctacgcctgcgccgcacagacccttgaaggggctgtggtcgtcctcccggcgggggtccaccacggccacagccttgggcaaagtctccggcggcagatggtggtcggtgatgatcaggtccatgcccagcgaagccgcaaagtcggcttcctccacggcagaaatgccgttatctacggtcacgatgagggtgcagcccttgttgtgcatggactggatggcgtttttggacaggccgtagccgtccccctcgcggctgggcagcatacacttgacggtcgcacccatgcccttgaggtgctggtacagcagggcggtggcggtcacgccgtccacatcgtaatcgccgaaaactgcgatggtctcgccgttgtcaatggcctgccagatgcgctgacaagcggcgtccatgtcggtcagcagggcggggtcggaaagttcctcctcccctgccagtaaggtaagcgcttcggcggggtcggtgatgccccgggcggcaaggatacccgccagcagggcgttttccttctgctgcgcagccagcacggccttatatttttcgtctgaccacggcgcttcgtccatggcctgctcttccagctgtgccgctgcctgctcggcaatggcggcggtcagctcccgcacagcagtgcggtccagcggtttttgttcccaagcacggtaggtcattcaaattccctcccggtcaggccatcgttggccagcattccctgcaaagcggcgatctcggaagaaatatccatggctacgtccgaaagcagattgttgtacaggttctcatacgcctgattcaaggtatgcaggatgcctgcaatatcccggcggatggtctcggcgttttcgccctgctgcccctgcacatcgttataggtgtgcagcaacttgagggtggtgggaatataatattctgcaaagcggcgggtcttgggctggctttccgggtgtgcctccagccagtcgcagatggcggtagtggtcttgtgcatcgccgccagttcctcccgcgcctgtgcgtcctgcatgagctgctgctctttttccagcacggcagcaaagcggcgggcggtatcgagattgagcggagcatcgccggtttccaccttttccggctgcggctgcgcggcggcagcggtagctgcctccttggcggcgcggtagtcctctgccgtcaggtagagcgtttcagtctcatcgtccagccacgcgttcagccagcccttatggatgtagctgcgcagctttttcagcgcttttttcttggtctggtgggtcaggcctgccagcatctccaccgccagccccttctgcgcgttcaacttttccgctgcatctgccagcaaccgcagctttttggaggccgacagccgggaggcaccagcggagatcatcacaccaaaaccacatgccagcaaggtaaagatgccgccgcagaattccagggctgtcatagccgcagcggtcagcagctcgccgcccacaacgtattgggcaatatcaatatcctgcacccagatgggggtagccgccgctgccacgccaaggcagctgatgccgctgataccaaaaatggccgcaaaggtgatgcccaccgccagcaaagtgtagccggcgctatggcgtttttttgcgctgatacggatgctttccaccgcggtcggctccggctttgcaaaaatctgccggaaccagccgggcatcccggcggggtcggcatccgcagcaccttcgcggaaaggctgctttgcatccccgtagggataacctctgcgcccctgccggaaggcctttgcggcctctccgatgccgtagttggctgcatggacggcggccttgcccacatcccacgcccggtcaccgatgtccatgcccctgccctcaaagccgtgggcaaaggcatcggtcatggtgtcgccaaaggcgcgcagctggtcttccagctcctgctgtacctgtcggccttcgttattatttcggttatcgttttcacgatcgtacatcaaaattttctcacccttctgccggtgcataccggctgatgatggcgcgggccacccgcagaccatccacggcggcgctcataatgccgcccgcatatcccgcaccctcgccgcaggggtaaagccctgccagctgggtgcacacaaagtcctcttcccgcttgagccgcaccgggctgctggtgcgggtctcaaggccggtcaggatggcgtccggcgcagtgtagcccgcgatcttgcgctcataggcgcgcagacccgctcgcagggtatccgccagccccccgggcagcagtgcgcccagatctgcggcagtcacaccgcggtcgtaggtgggctgtacgctgccaatatgcagctgcccgcgcccttccagaaagctttgcacattctctgccggggcggcgtaggctccggcggcacgaccggcggcataggcttttgcttccagctcccgctggaaggcgatggcgcggcgggggtcgtttgcaaagtctgccccgcccacgctgaccaccaccgccgcattggcgtttttgccgctgcgggcgtggtagctcatgccgttggtcacaacacgctcttcctcactggccgaagccactacctgaccgccgggacacatacagaaggtgtacacgcaccggtcgccaacgtgctgggagagctggtattcgccccggggcagcgccggatgtccggcagcctcgtggtacaggcttttttcgatctcgctttgcaggtgctcggcgcggaaacccacgctgaaaggcttgcattccagcacaaggccgctatccatcagcatgctgaacgtatcccgtgccgagtgccccactgcaaacaccagtgtctcgcaggcaaagctgccgtttgtagtagtgatgcccacaagtcgtccgttttttcgctccagtccggtgagcgcggtgttgaagtgcacctcgccgcccagagattcgatctccttgcggatggaggtgatgacaccgcgcagcaggtcggtgcccacatggggcttttgcttccatgcgatctctgccggggcaccgtgctgcaaaaacacctcggtgacaaaatcacacagttcatccccgatgcgggtggtcagcttgccatccgagaaagtgcctgcgccgccctcgccgaactggatgttggcgttggggtccagctgaccggtggcggaaaagtgctccaccgcctgcacacgggcatccagcgcaggaccgcgctccagcacgatggggcggtaaccctgccgtgccagcagcaaggccgcaaacagccccgccgggcccagtccgcacaccacagggcggtgcgcaagcggctgggtacctgcgtgcagggtaaagtctgcccggcggtgcagggcggcgtccgggcagcgggctgcaagggcggcctcctccccgggctgcttgagggtgaccgccacggtatataccagtttgggctggccgtggcgggcatccaccgaaagctttgccacgccggtgtgctctaccttgctgcggggcacccgcagagtgtgcagcgccttttcaaatgcctgcggctctgcggcagagaggggtaggcggatgttgcgaaccagaatcatttgttgtgttttcctttaaatttagttgctttcaatgcggcattgcagcacatagctgcccagtgcaaaaatcttgccgttggagggcacatacagccggcaggcaatgttctgttggccggtagccacggcaaagtcctcggcgtcgatctcaatgaccacctgctcgggggtcaaagtctccatagcgcccttggggccgcagagaatcacgttcatcagccgctcggtctccaccgtcagctgataggtggcgggcaggttgaccacctgcacacagctggcgggcaggttcatggtcttggtctccagcccggagcagtcaaagctgaccgtgatggtggagatattgtccagcagatagatatctgtcggcagctcaatgggcatctcatacaccttgttcagactgaaggtggaaaggtcgatggtgccgatggacaaggtggacagtgcatcgatcttttctgccgggcccgctaccttgagctgcttgcagctgagggcatagctcagcaccgagttatcgaacccgcgcggcgcgttgataaaattcaccttcaccggcagggtcgccgtcttgtacacttgcagcgtcacgtccacattgctttcttccagtgtggtgtactggaacttgacctccttgccgccgctggtgtagaagcgcagaggggtgttcagcgtgaccgactcggtcagttcgctgctgtaagatgcctcggcggtgcaggtagccaccttgctcagctcgctgctggggccggacagggtgacggtctccttggatacctcagtactgtaaaggatatagccatccgcaatgcgcagatagttggtggtagcggtaacaggcagggtcttttcctccaccacgtcaaataccacgtccaccgtgttgtcgctgccctccatggtcacggtcacgccgttgagcaggccgtttgcaccgcgcaccagcagccgcagggtcttttcgccgctgtcgcgcacgctggaccagtccgggtagaccacaaaatctgaggcgctgagcccgccgatggtgtagccatcgccggaaagcttcaggttcacggtcttgtcctcggcgctgacgatgctcaggccccgagaggtataggcggcggaatcgtaggtgtaatccaccggcacattatagatggtgttggtggtgccgggttgaacgatgatggtgaccaccatccatgcaacgatggcacccagcacagacagtgccagccggacgcggcggtcatccagaagatttttctttttgcggacggcaggctttgcgccattcgtcttgttcggctggttgctcattgctgctcgtcctcccccttctggctgatccagttccacagctttttcgcctgctccacccagctgtcggcggtgttcttttccaccgtggactccttggggatcatctcgtcgatgaggcgggtatacaggctctggcgatcaaaatgacggatcagcacaccatttttggccatggagatgatgccggtctcctcgctgaccacgatggcgatagcgtcggagttttccgcaatgccaaggcaggcgcggtggcgggtgcccatatccttgcccagatccagattgttggaaaggggcagcacgcagcccgccgccttgatgcggccgttctcaatgatggcggcaccgtcatgcaggggggtgccctcgtagaagatggtgcccagcacctccagattgaccgcgctgttcaccggggtgccggtgcgcacgatctcggaaaggttggtgtggcgctccagcacgatgagggcgccggtcttggtctcagaaaagcgctcggctgcatcgcagatggcaatgatggcgctgcgccacgcacccttgagactggggtcgttgtagcgtccctttacgttgaacagcttggaagcccactggtcggtctgacccatgcgctccagtgcacgacggatctcaggctggaacagcaccacaagggtgagcagaccgacctgcagcagcgagttgagcagccatgtaacggtgcgcatattcagggtgttggctaccagatacacgaccatgaccagcagcgcacccttggccagctgcccggcgcgggtgcgattgatgatgcccagcagctggtagatcaggaacgcgatgatgatgatatccagcagatcaacgattttgaaggtctgaaaatttgcgatgatcgcattcagtgtcatgcgtgtgtgcccccttacacagcttcgatcagggcgacagcgtgggcagcaatgcccagtccctcgccggtaaagcccagatgctcctccgtggtggcctttacgcttaccgcctctaccggcaggccgaaagccgccgccagattggcacgcatggccgggatatggggtgcaagcttggggcgctggcacagcagggtggcatcgatgttctcaatgcgccagccatgctccttgaggatctgcgccacgcggcaggccagcttcaggctgtcggcaccggcgtactccgggtcattgtccgggaaatgctggccgatatcccccagcgccgcagcgcccagcacagcatccatcaccgcatgggtcagcacgtccgcatccgaatgccccagcagacctttttcaaaggggatctccaccccgccaaggatcagcttgcgctgctctaccaaacgatgtacatcatagccgtgtccaatacgcatttccgtttccttcctctgtgccgggcagggcagatcctcccgggtggtgatcttcaggtttgcatagtcgccctgcgtcagctgcaccgggcgtccggtcagttcaaacaggctgcaatcatcggtaacaaggcgggcgcgagtctcgtccagttcttccagcgccgcaaggtacgctgcacggtcaaagcactggggggtctgcaccgcatacagggtactgcggtccggggtggcgcataccgcgcagtccgggggcacggttttgccatcgccccgggcagcggtcttgatggtatccttcaccggcaccgccggggctgctgcgccgcaccgggcggcagcttccagcgccgccgtaatgaccgacgcactcacaaaggggcgggcggcatcgtgcactgccaccagctctccgtgcgctgccagcacgccgttttttgcgctctcggcgcgggtagccccgcccgctacgatctgcacaggctttgggcagtccgccgcctgctgcgccacaaactcccggtttttgcctgccaccagcacaagctcggtgatctgcgggcactgggcaaaggcgcggatgctgcggtgcagcaccgtttcgcctcccagatcaaagctgagcttatcaaaccccatgcgggtcgagctgcccgccgccaccaatactgccgatacagttttttccatctcttccacctaccctgccgctgtgccgcgctgcacgcccacagctgcttataataaaccatgttttattatagcgtatcacagcgcaaacttcaaccgattttacacagcaaaagtgcatccttgctgcataaagccctgcggtctgtcctgaaaggacagtcacccagagtgtgcgctttcgccccctcaggcgctgaccccttccgtctgctcactgcgttcgcagccaccttccccaaggggacggcttttcgcggtgacggtacacctccataaggcttttgctccggtcaactatctgctgaacgcaaaaaagggctgctgcacaaaacgtgcagcagccccgcagatgctttgaaatgtttttacttcaggatgggctcaatggcggcagccagagcatccttctgtgcctgcgcctcggccagatccttgcccagcgtggtgaagtaggtcttgatcttcggctcagtgccggagggacgcaccaccacggtagcgccgttttccagcgtgtagatcagcacgttggcagcgggcaaaccggtctcttccggcttcttgtagtcggtcaccttgaccaccttatggccggccagctccacagggggctggtcacgcagcttctgcatgatggaagccatctcctccatgccggtcaggccggggaactcgaagctgtccaccttgttcaggtagcggccgtactgagcgtagatctcttccagacgctgcttgatggaggaaccgatgctgcggtagtaagcagccatctcgcagatgagcatggagccgatgacggcgtccttatcgcggacgtaggggccagccagatagccgtagctctcctcaaagccgaagatgaagcggtcgacctcaccggcagcctcgaggttggcgatctggtcgccgatccacttgaagccggtcagcacattgcgcatctccacgccgtaatgctttgccacagcgtctgccagcggagtggacacgatggacttgactgccacggggttcttgggcatggtgcccttctcgatacggcctgcgcagatgtaatccagcagcagaacgcccatctcgttaccggacaccagctcatagctgccgtccgggcacttcatggcaatgcccacgcggtcggcgtcggggtcggtagccagcatcaggtcggcaccggtcttggtggccagttccagacccagcttcagtgcctcgaagatctcggggttggggtaggagcaggtggtgaagtagccgttggggtactcctgctcgggcacgatggtgatatcggtgatgcccatatcgttgagcacatgggtcacgggcacaaggccggagccgttcagcgggctgtacaccaacttcaggccggcagtcttgcacagacccgggcgcacctgacgtgcctcaatggcatcgtacagcgcctttttgcagtcgtcgcccacaaagcggatcatgccgttctccacgccctcggcaaaggagatgtactttgcaccggtgagcacatcggtcttctggatctcatcatagacgatggcggcggcgtcatcggtcatctggcagccgtccgggccgtaggccttgtagccgttgtacttggcagggttgtgggaagcggtgaccatgataccggcgttgcagttatagtaacgggtagcaaagctcagcgcgggcacaggcatcagggcatcatagatgcgcaccttgataccgttggctgccagaacgccagcggcggtcttggcaaagacatcactctttaggcggctgtcgtagctgatggccacagtctgggtaccgccctgggtcagcacccagtttgccagaccctgcgttgcctgacggacaacgtagatgttcatgcggttggtaccggcacccagcacgccgcgcagacctgcggtgccaaacttcagcgccacagcaaagcgatccttgatctcatcgtcattgccttcgacctttgccagctccggcttcaggtctgcatcctccagatccgctgccagccagcgcttatattcatccagatacatcttgtacaccttacctttgtttaaaatctttttccccggatcgaaatggtttgtataaacctacttatactataaactcttgctccgcttatgtcaattgcgtaaaatggccgaagtttgtgcccttaaaaccgacaaatgccacaaaaaaccggttcttctgctatatttattgcgtttttcgaagtatccagcagctggtagggctggtgtacatcctccagcacctccagccactgctccggccccacgccgttttcacacaggtagcgcagcagccgcatcacccggccaaagctgtccgccggggcaagcaccgtgctgctgcgcaccttgccgccctgctcccggcgcagctgtgccagcaccccctgcggggtggatgcggcgcagtacaccagcgtacaggcgtgttgcaagccctccagttctgaataggtacggatatagcggcaacattccccatttgtcatgttctctcgttctcctttctgctgcattgacaactttcctgtgctttactataatgattttaaacagaaaaaactgtcgaagtatggaaaatatatccattattttccacttttagcatttttgacaaaccatgcgccatgcagggagggacaccatgtattctgtgaccaacagctttggcctgaacgggctgcgcggctttgccgttgcggtggaagccgatgtttccggcgggctgcccgcgttttccatcgtcggcctgccggactctgccgtgcgggaaagcgccgaccgggtgcgcgccgccatcaaaaaccttggcttccgcttcccggaccggcgcatcaccatcaaccttgcccccgccgatgtgcgcaagaccggcccggtgtacgacctgccgctgcttctggcgctgctgaccgccagcggacagttagaagaagtacctgccgatgctgcctttctgggcgagcttgcactggacggcagtctgcgcccggtgtccggcgtgctgcccatggcgcttgccgctgccgagcacggcatccgggcgctgtacgtcccgacagagaacgccgccgaggcagccgaggcctgtgccgacaccatgaccgtctatccagcccacaccgcccgggaggtggtggaggcactgaagggcatccgccccctctcccctgccgctgccatcccctttgacccggaggacgcatggcagcaggtgccggattttgcggacgtgatggggcagtcgctggcgcggcgcgccatggtcatagcggccgcaggcgggcacaacgtgcttttgaccggcgcacccggcaccggcaaatccatgctggcaaagcgcctgccgggcatcctgccacctctgacccgggaggaagcggtggagacgaccaagatctactccattgccgggcagctgccgcagggacgcgggctgatctctgcccgccccttccgcagcccgcaccactcggccagcgctgccgcccttgccggcggcggagcgcagtttcgtccgggcgagtgcagtcttgccaactgcggcgtgctgtttttggacgagctgccggagttttcccgcgagagcttagaggtgctgcgccagccgctggaggacggccagatcaccgtgagccgcgccgccggaagcgccacctaccccagccacttccagctggtagccgccatgaacccctgcaaatgcggctactacggccaccccacccgcgcctgcacctgctcgcccagtgcggtgcggcagtaccgcagccgggtgtccggcccgcttttggaccgcatcgacctgtgcgtggagatggaccccatcgcctttgacgagctgcacaccgccgcgccctccgagagcagcgcagagctgcgcaagcaggtgctggccgcccgcgccattcaggccaagcgctacgctgcgccgggctttaagggagtgcactgcaacgcccagctgaacgccggacaggtgcggcgcatctgccgcatgacccccggtgccgagcagctgctgcgcagttcctacgatgcactgggactttccgctcgggcgcatgaccgcattttgcgggtagcccgcactgtggccgaccttgcgggcaagaccctgctggacgaggattctctgctggaggcgctgcaataccgggcgcaggagaaattggacggataaggcagtctgcactctaaaaatacaacagaaagaggacggaacacatgaagcgcgcatacacaaacggtattcttctggacggtaccgagcagatggaaccggtacggggcaaggtgctgctgaccgaaaacgataagatcaccgccattgcagatgcgagtgtaagccttgacggctacgaggtcatcgacctgcacggtgggtatctgtgcccggggctcatcaacctgcacgtccatctggcaggcaacggcaaacccagcgcaaagccccgggacaatgcagcgctggtacgcaagatcctgagcaacaggctaacccgcgccatcgcataccggctggtgtgcagttatgccaagctggaactgctgggcggcgtgaccaccgtgcgcaccgtgggcggcattgcggactttgacacccgctgccgggacgacagcgccgccggaaaggtgctggcaccccgcattctggccgccaacgaaggcatctcggtgccgggcgggcacatggcaggctcggtagcagtagcggcacacaacaacgccgaggcgctggcgcagctgaaaaaggccagcgcacagaaggtagaccttgtcaagctgatgatcaccggcggcgtgctggacgccaccgaaaagggcacccccggcgagatgaagatgccgccggagatgatcaaagccgtctgcgatgcagcccacaagctgggctacaccgttgccgcccataccgaatcccccgcgggcgtgaaggctgcgctggaaaacggtgtagattccattgagcacggcgcaaaaatggacgaggagacggttcgtctgtacaaggagcggggcgcatttctgtgcacgaccatctccccggcactgccctatgcgctgtttgacaccgccgtttcgggcgcatcagaaaaagaccagtacaacggaaagatcgtctttgacggcgtgatcgaaagtgcaaaaaccgcgctggcaaacggcatcccggtgggcttgggcaacgatgtaggctgcccctacatcacccagtatgatttctggcgggagttgtgctacttccacaaatactgctgtgtgagcaaccgttttgccctctacacggccaccctgcgcaacgcgcagctggcgggcatcggcgatgtgaccggctctatcgcgcccggcaaaagcgcagactttatcgtaacgcgcgaaaacccgctggaggatctgcgggctttgcaacatctggaactagtggtctgccgcggccgtgccgtgaaaaagccctcccctaagcgcaaaaaagaagtggacgccctgctggatccgtatctcgtgtaagcaacctgtccaacatataaaaacgcgagtggccaaaacggtcgctcgcgtttttgtttgctatcggtggttgcattttctcttttccggtgccgcccggtgtggtatactggaaacgtagaggcaaaaatggaaaggagcaaagtacaaatgaacattcgtaaagccgaagaaaaagacattcccagactgcttgcactgctgggacaggtgctgcagatccacgcagagatacgcccggatatttttattcccggcaccacaaaatacactgtctgcgagttagcagagcttttgaagcaggaggacaagcccatctacgttgccgtgaacgaggaggatgtgtgcatgggctatgccttctgtcagctgaagaagcagcctttttccaccaacatggtacccttcaagtcactgttcattgatgacctttgcgttgacaagcaggcgcgcggacagcacatcggggaaagcctgtttgaatatgtaaagcagcaggcaaaagcgctgggttgctacgaggtgaccctgaacgtctgggcggggaacacttcggcagagcacttttatgaaaagatgggcatgaaaaccaaggaacggcagatggagtatattctgtaactcggcttcttggtttcaggacaaataatgcattctatatcccccggcaggcagctacaaaacggctgtccgctttttatcgcaatataaaatagccgccattcatttaatcgattcctttgagttttctttgtataaatcatctaaaagctctttttgtgtttgctctactgctttgctataatgttctctagcttcctctccttgtaacgttttatacccgccatttccgtctggaatatcaacacgaacaacattttgctcatctaattcggatgctgcattaagtgcatcttcaatttctttactgcccataatttgtggagcatcagtcgttattggcctgcccaatattataattagtagcaccgctattaccgcaaacattaacacaatttttcttgctctcatccgaaacgctcctttttagatttatttcttatttcggggctttttaattttgtaattcacaatccgacttgcaagataaattatccaaaaagtaaggatataattgttagttataaactttgtaaaggtcgcttgttcccctaatcttatttcaacaaagaaaaatatcaaatactgtacaactagcatactaccaacgtctactaccagttttttcactatcttcggctcctttctataaacccttttatccagataacgcagcaaatcactggtttgttgcaagattttctgtttttatctatcttaacaaaaaatcgcccaggtgtttgtgctttccgccccagttggcgtgaaacggcggctcaatccagcagcctgcgccgcactctgcaagcatttctttcaaaagctgctcccgttttgcgtgttcggaagggcgggtgtggttataagcatacagccgctccatgcaaagttcctgctctgccatgatggattcatccgttgggtcgtagacttgttggctgtggatcgcattttttatcggcatggttctactctccttatttataaggaatctttctcatttttcagtagattcttccagattctttcggtactgtgccggactgacaccatactctttcttgaatacccggctaaaatagagtgggttatcataccctacgatctctgcaatttctccaatattgtattcggtgttctccaataagctttgtgcatttaccatccgaagggacaggatgtattgtgcagggcttattttcatgtacagcttaaaattacggataaaccagttcgtactgatatgcagcgattctgcgtaatcgtccacactgacctttgtattataattctcgttaaagtaggcagcggcggcttcgatttcttcggggatgcttgtagttgttttctcgctttcctgctgttgcctgcttactaaaagcagaatgatgttgaagagagaagcaatatagtcttcatagccatattcacattgttgcagttcccggatgatctttcggaacagcattttgtaatccggcagtgtgccgctgtaaaaaacgtgcttgtccaatggtattccgtgatagttcaggatgtttttgacatcatatcctgtaaagtgaatccagaacacctctggatgatcttctacatagtagacatacttctggatttctgtcggctgataaagcaccatgtgtccagaagtcaccacttcctcaacaccatcgaaccagaagtgtgctttaccagatgccacatagaggatttgatagtctctgcgaccctttgcccaaaaagtaggtagcttagggcgttttttcaagcgataagtgccacaactgcctacgaccagcggctttgagtagtctttgaaatccaaacgggagttgttcaaatatcctgagttgaaatacatccctgcgtcctcctcatcttcagagattttacagtgatttgagaaatgttctatcaaaaaattacaaactctttgattttgtgcatattttgttccatcttgtctatatcttttcgttccattagattctataatattttcagacgaaacgcaagagatttgggtaacttgcgtaatgagcattccagtctgaagtgcgcagcagattggtcgcgcccacacaaaacaagcaagatgggagaaagcacaatgactgagaaacgttatctaaagtggtataataaagtcggctatggttcaggcgatattgcaggcaacgtggtgtatgcattcctgtcctccttcgtcatgatctatctgaccaacaccgttggcctgaaccccggtattgtcggcactctgattgcagtttccaaactgctggacggtgtgacggacattttctttggttctttgattgacaaaacgcattctaagatgggcaaagcccgtccttggatgctgtacggctacattggctgtgccattacgctggtggcaattttcgccatcccgaccaatctgggacagtttgctcagtacgcatggttcctgatcgcatatactctgctgaacgctgtattctacactgccaacaacattgcttactctgcactgacagctctcatcacgaagaacagtgccgaacaggtcgagatgggttcttggcgtttcatgttcgcctttgccaccagcctgctcatccagtccatcacgctgggtgctgttacggcattgggcggtggtgctgccggttggcgcactgttgcaatcatctacgccatcatcggtctgcttgtcaacaccctctccgttttctccgtgaaggaactgccggaaggcgaattggtggataccaccgacaaaaaggaaatcgagcaggacgaaaagtacaatctggttcaggctgcaaagctgcttgctggtaacaaatattatatgatgatttgcgtcacctacattttgcagcagatctacggtgccatgatcagcatgggcacctactatgcaacctacatccttggcaaccagaatctgttcggtgtattctcttgggcaatcaacattcctctgatcatcgcactggtgttcaccccgaccttggttgcaaagtggaatggaatgtataagctgaatgtaatgagctatactctggcaacgatttctcgtgcactggttgctgtagccggttacatgggcagcggcaatgtgaccttgatgctgctctttactgcaatcgcagctcttggtcagggtccttggcagggcgatatgaacgctgcgattgctgcttgctctgaatatacttggctgacgaagcataagcgcgtggatggcacgatgtactcctgcacttctctcggtgtgaagctgggcggcggtctaggtactgccatcaccggctggttactggcagcaagccatttcgatagtgcgctggctgtccagcccgaatcctgcatctcgatgctgaagatcatgtatctggtgattccgtttgctctggatgccatcatcaccttcattctctctcgtatgaaggtcgaagaagcaaatgaaaaactgcgtgcagcagtctgataacaagccattatcatttctccttcatctgctgttccccggaggaatccagcgattcctccggggaggctggagaaatattataaaattataaaaggtaaatgaggaaatactatggctgcatttgattttgcaaaagtaaaagaccccacctttttcaaggaaaacgtgctgaatgctcatgcaagtttccgtacttacgcttcccgcgaagaatatcggacaggctcctcttctttggcgctgaagctggacggtatctggaaattcgcctacgcaaagaactacaccagtgccatccccggctttgaaaagacagattacgattgcagcggctgggatgacattcatgttccggcacacatccagatggagggctacgacattccccagtacgcgaatgttcagtatccgtgggatggccgtgaagaagtacagccgggcgagatcccgcagcggttcaatccggtggcaagctatgtaaaatacttcgagctgccggaatccatgcagggcaagcccgtccacatcgagttcgagggtgtggaaagcggcatggctctttggctgaacgggtcttatgtgggctataccgaggatagcttctccgcacacgcattcgatttgactccctatctccagccgggcgtgaacaaacttgctgtgcaggtgttcaagtggacttcctccagctggtgcgaagatcaggacttcttccgcttctccggcatcttccgcagcgtgtggctgtacgccatccccaccgtgcatctggaagatatatccgtcaaaacgctgttcgccggggatgattttactcattccacgctggaagttgcattgcaggcggagggtaagggcgcagcccgtctgaccctgcgccgcagtgaacaggaagtgttctccgaaaaaatcgcactgaacggcggctctgcgctgttcagccatgcggtggagaacccccacctgtggagtgcagaggacccggctctgtatgaactggaaattgagctgctggacgatgcaggccatctggtagaggtgaccgggcagaaagtcggtttccgcaagttcgagctgaagaacaatcggatgctgctcaacggcaagcgcatcgtgttcaagggtgccaaccgtcatgatttcagctccattacgggtcgtgctgtgggcgtacacacccatgaggaactgcttcgggatattatcaccatgaagcagaacaacatcaatgccatccgtaccagccattaccagaatcaggatgcactgtacgacctgtgcgacgagtatggtctgtatctgatcgcagagaacaatctggaatcccatggcacatgggacattcatcaggctggcattcgcggcattgagggcgttttgcccaatgataagccggagtggaaagctgtcttgttcgaccgcatgaattccacttaccagcgtgacaaaaaccatcctgctgttctgatctggtctttgggcaacgaatcgtttggcggtgagaccctgctccagatggcagagatggtccgccgctttgatgacacccgtctggtgcattacgaaggtgtggtcaatgatccccgcttcctcgaaaccaccgatatcgagagccatatgtacagcacggtcaaggacattaaagagtatctggcacagggcgatcagcggccttatatcgagtgcgaatactctcatgctatgggcaactccaacggtgctttgcacaagtacacggaacttgccgaccagaaggactgcggctatcagggcggctttatctgggattacatcgaccagtccatctggaaaaaagaccgctacggcaagtggttccaagcctacggcggcgacttcggtgagcgtcctaccgactataatttcagcgggaacggcattgcctacggtggtgaccgtgctccttctcccaagatgcaggaggtcaagttctgctatcagaacatcgccgtttccatcgacaactctggctttgaagtctggaataagaatctgttcacctctacgggtgctttcgactgcgttgcactgctgcatcgtgatggaaagttgtatcagcaacaggaactgaccaatattgatgttgctcccgaagagcgttccagcttcccgctgccgtttatggttcctgcgctccccggtgaatatgcagtgaccatcagcttccgtttgaaggaggacaccagctgggcaaagaaaggtcatgaagtcgcctttggacagggtgtggtcgctgtggttcgttccattcccagcaagaaggtcacgccgtttaccgttacgcacggtacacacaacatcggtgtccggggtgagaatttcgatgttttgttctccgatctgaagggcggcctgacttcctaccgctatgccggcaaggagatgattcaggagatcccccgtcccaacttctggcgcgctcccaccgacaacgactgcggcaacaacatgggcggcgttcgcggtcagtggaagctggcaagcctgtacgctaccgccaagggcatcggcaaggagatcccgtctgttcacggcggcaccatcctccagaaccccacctgcgaggtggaagccgacagcgtagtcgtgacctatctctataacctccagaccagccccgcagcagagtgcagcctgcagtaccgtgtgttcggtgatggccgcatccagaccaccctgcactatgacccggtggaaggacttgcagcaatgccggagttcggcgtactgttcaagatcgacgctgactacgacacggtggagtggtacggaaacggccctgcggagacctactgggatcgtcagcacggtgccaagctgggcatttaccagaacaaggttgcagacaacatggcgcagtaccttgtgccgcaggagtgcggtgcaaagaccgctgtgcgctgggcaaaggtagtggaccgcaagggtcgcgggctgctgtttaccgcagatgccgcaaagcccatgttcttctctgcgctgccctacactccccatgaaatggagagtgccaagcacccctacgagctgcccccggtccattacacggtgattcgtgccatcggcgagcagatgggcgtcggcggtgatgacagctggggtgccaatgtccacccggagtatattcctgatgtgactaagcctgtggagttcacctttacgttccgtggcatctgaccctcgttattaagacaccttcgcgttgagataaggacatccctgcatgagattcctatcaaaagcgagggtgtcttttttggtatcacaaaatctcaattcctgacaccactatttataagtagtgctttgctctatataagtagcgttgctatgtcaaaataaccgtattcagcttttgtttggagcatttctttgaatggttctccaaactttctttaacgtattgaagtatacaaattttatcatattccaccggtggatacttaaattttttcagtaagtgttttaccatcttacgcatactcgcacgggcagtttcttttttctgcaggtctattacgctcgcattactgaatttctgcgtttccagccatctccattgcagcgttcgattgacacaggttgcgttatcggcagatacagcaaacacaacgggcagctctggtaacagagctgcccgttgtgttcgtttatgaaaaggagaacttagatctcataccacttgatctcgttggcatccagatgcagcgcaaagctgctgccgccggtggtgtaaacggtggtgtcctgcggctcgtaggtgttgttcactacgcaatacttgccgttcttgacgtaggcgtgaacttctacattataattggagctgaaccatgtatgcagttcctcctcgctgtgggcactccacaggatagcgcggtaaagggtgcggctgttggcaaaactgtaaggcacaccgctgatgtacacggcacgacccttgccgaagtcgtgtgccgccatctgcacttctttgtttcgctgcaccagcacttcggtgccctcaagggcgtagatgttctttttgccctcgccaaagtccacgggttggtcggcgtcctgcaagataaagtggtcggggtgttcttcccagttgtatttgtcgtagttcagggtgaagccgttttcttcttccacgcccaacacgctggcaagctggagaatgtggccctgatacgggtgaccggaaggctcacccacgccgatgaagccgccgccattccagacgaacttgcggatagcggaggagatctccggatcttcccaccagatgccgccggtgtgtgcggtgtcggcatcgccgacattgataatgacatccaacgaatccagcagatgcgggtcgttcttgatatcctcaaagctgataaacttcacatcaaagggcgcaccggacagcatctcaatgacgccggcatagctatagttctgcttgtaatagagggcgtgatgcaccatgtgacaaccccaagcccgcattttgccccaacagttcagcacggccactcgcttgacacagtagggtgtggtgcccttgatgttctcgtacagttcgcggaactcgttgcagacgctctccacatagtccacgaactccgggaactgcaaggccagtttcagatagccgccatagccgatgcggtcaatgggcttgcgcaggatagcgcggcgggctgtaacccagttctccttggcttcccgcaccgggtcgccgccctcgtggaaggtgtcggggaagaagtacggcaggaaacggccctcggtgtacttcacgccctcaatgtcagagatcaggcgcagggtggagccgttgcccacgctgcccactacggcatccagtccgatggtcttgaactccggcatgaaaggttcggtgccgatccagtgatcgccgaggaacatcatggcttcgcacccgcacgcatgggtgatgtccaccatctccttggcaagctttgccacctcgcggcgctggaaggcctgaaaatcccggaattccttgctgggcacccggtactggttgttatagtagccctgatcgatgatgtactccgggcggaacttgtagcccacttcctgctcaaactggttgaggatataagggctgaccgaagcagagtatccataccagtccacgaacttctcccgcttcagctcgtcgaagatcagggtgaactggtggaagaaggtggtgtagcggatgacgttaacataggggtgctctgcaatgaacttgcgcaggcgctccatggaatacttgtgggtcttgggctgacgcacatcaaaggtgatctggtgctcaaagttcgtccagccgttggtggtggcgttgtacatgtgcaccgggtcccagatgaggtaagccagaaaactgacggtatactcatggaacggtacggcctgtacggtcacactgccgtcggcgtagctccactgctccggcggcacgggctgaccggtggttcgatccatgacctcccaccagcgggtgatgtcgtcgttggtattcacctgcatcagctccgggctgatgcccttcatcagcgggatggtcacggtgtcgccgggggcggtgtaaaagccggtcatgatgtagcactgctgtacctcatccgggtttgcctttgcccatgcgttgtccttgcgggtggtatagtaggtggagtagatcttggcgtccgcatccttgagctgctgcgggaagtcggtgccgtcgcagtcgcggatggcatcggcaccccacttttttaagatctccagtgtttcgggcacaacgtccaagtctgtgggaatggtcacgcgcccggtctttctcaattcgtccatgggaaactctccttttgcctctctttgaatcgtagggggtcaatcgtaggcggcgttatacagcgccagcacagccagcagcagcgctacgcccaccagcatgatgccaagccctgccagctgcccggtcattttccagccggacaccaccagcaccagtgccagtacgaacagcaccagcatcaggatcatgcgcagggcgggatggtttttccaatatgctttcatcgtctgtcaccttaacctttcaggccgcccacggtcatgccctgcgtcagctgccgctgcacgcagatgtacaaaatcagggtgggcagcatcaccagcacaaggcctgcgtacatggtaccgtactgggcggcgctctgctgcgcctgcatcaggttcaaaagacctaccggcagggtgcggggtgccttggtggagctcatcagggtcatggagatgatatactcgttccagaaggacaggaagttgaacaggataatggtgatgatagagggctttgccatggggaagatgatgcgggtcatggtggaaaaatagcttgcaccgtcgatataggcggcctcctcaaaatcgtggggcagggtggcaaagtagcccgacagcaggtagatggtaaagggcagcgcggtggcggcgtataccaccgccagcaccaccagattgttcagcagaaagccgctgccgaaatggcctttcagccacacatcgctgtcccgcagcatcaaaaagatgggcaccacgatgtagttcacgttgatgaacaggcccgccatgaacagggtgttcagtaccttgcaccccttgaagtggaagcgggacaggcagtaggcggcgggcagggcaacgaccagcagcagcgccagcgccagcgcggtgacgatgaccgaattgagcatatattcgcccattttcgcgccgttccatgcgttgacgaagttctgccagtagaacccggcgggcagtgcccagggattgccgtagaactctgcattctgcttgatggaggccatgaacacccatgccaccggcacgatgatggtaacggccagcagaaccagcacaaaatagatgaaaaacttgtacagaccttccgcagagcgggaagatttttcggtggtattctgcatcttcttccctccttaaaattccagcgggtcacggctggtggccttgttgacacaggcggacagcgcaaacgagaacaggaaaatgacgacgccgatggccatactatagccatacaggccagcgtccttctggctgtacatatagctcagcgccacatccgatgcgccgttcggcccgccgctggtcatggccttgacaaacaggaacgccatgttgatggtggagataatgaagaaggtcagggtggtgcggatgttcgtccagatgagggggatggtgatctggaagaactgggtcagccgcccggcaccgtccagattggcactctcgtacaggctgatgggcacggcagacatggaggccatatacatgaccatgtaatagcccacagcctgccacaccatcgcaatgatgatggaggggatgaccagtttttcacctttccagaggatggggtcggtcatatcccggaacagaccaatgatgctgttcagcataccattttccggcttgtagatggccgagaaaataccggagatgacgaccacggaaagaatgttggggatgtagaagatgatgcggaaaaagttctgccctttgatcttctcccgggtgaggatggcggcaaataccagtgcaaaggcgaaggtgatcagggtgaccgttaccaccagcaggatcatattctgcatagagcggatgaactgggcgtcccgcagcagatgctggaagtttttaagccccacaaaggtctcgttgggagaataggcaccccgctcatacaagctcatgcggaacacattgagggtgggcaggatcataaagatgaaaaacaggatggtggccggtgccacgcagagaaacacaaaccgtttgcggctcttgtcagatttcatagacaaaccgctcctttctattgggatcccgaaaccacaaaaagcggaggcggtcaaaaccgcccccgctgggcagggctcaattactcaatgatgttagcgcgcatctggtcgctggcggacttgatgccatcgatccactgctgctcggtcatgctgccggagaccagcgagttgacgggatcgaagaacacggtgcggacttccacgccggggatggcgctgaaggctgcaaagttgcccatagctgcctttgcgccgttatcatagatggagtagaacatcttgttgtcgccgtccagatcatcggcaatgcccagcacaggctggatcgcaccgctctcggcgaacagcttgcaggcttcgtcactatacaggtacgccacgaactgcttggctgcatccagatgctcagcacccgccgggatccatgcctgctcgaaccaggtgtagctgtagctgtcgccgccagccttgacagcgggcagggcggtcatgccccactcaaagccgtctgcacggggtgcttcggccatctcgcccacgatccaggtgccgttgggcataaacagggccttgttgtccagcaccagctgctggttctgggtaaagtcctgatcgttggcctgtgcgggggtgatggggttggtgtaggaagccagctttgtcacgatatcaaagcaggtctttgcctcgggggtgtcccagatgccttcttcgtagtgggtagccttgttgaagaactccgggccgccggcagcgtacatcagcgcatagaagaaggcgtcgaagtagccggtggtggggtaggtgaacaggtaggtgccctcagcggcagccttgtcgcccagtgcccacatctcgtcccaggtcttgggcacgtcccagcccttttccttcaggaaaccggcgttgtagaacaggccgcaggggctgtagaacatgggagccagataggttttgccgtcgccgtaggggttggtcagggaggtgtcggtaaagccgccggcgatcttctcgctcaccttcttgctctcgccgggcacggtcatgctcagcacatcggtgatgtcggcgatcaggttgcccttgatgaactgctcggtcagggcagcttcacggccggtggccagatggaccacgtcggggtagtcgccgccctgcatggaggggccgatgacgtcctccagcttcttgtcagtggtcaggtctaccttgatgccggtctgggcggtaaaggcctcggcgaccttcttccacatatcagcgccgtagccggtctcgatggcggctaccttgatggtaacgtctgcagccgccgctgcggaagaagcggcggtggaggatgccacgctggatgcggtggagctggaagagccgccacaggcagccagacccagtgcagcggcgccaacgccggccgccttcaggaaattacgacgagaaatacgattcatactgtgttgcctccatcattttgttccgttcaaacacagccgggcaaacaggctttgcccgaaggactgtgtgtttttctgcctccaatataaactctttcgcttccttgctcaagaggtttgttgtttcattttttatagatattgctttctgaaaaattctttcagcaaaagtgctaaatatcttttaaaagtttcagcataatccccaacctgtaactattttgacatattccgaagagacctgagaaacaaaaatataaaaattagcctaaaatcagggcttgcattttttcttcattgcctctataataagaaaaaacatacgaagcaacgcatcgtttttaggcttgtatttttagtatcttgtttttatttttatgttttttgttcttcgcctcaaaaggagccatttatgagtaccgagcgatttgatatccgtcatgctcccgctccacgggaatccttccggctgctgtacatcagcaaaagcaaatttggcggcgattggaacagtaccacccacacccactcctgcacagagctgttctactgcctcagcggcgagggacagttctaccttgccgggcagctgttcccggtaaagccggacgatatggtcattgtgaacccgcaggtggagcataccgagcttagcctgaacgcctcgcccttggagtatatcgtgctgggcgttgccagcatggagtttttgttcagcaaggcggatacgaactacgccatcttcaattgccgggagaaccgggagcggatggtcacgttgctgcacatgctgctggccgaggccgaccgcagcttagacggctgcgagaccgtttgtcaggacctgctggaggtactgctgatctggctggtgcgctgcaccaccatttcgctgcagctggaggaggctgccccgaccgagaaccgggagtgcgccgagatcaagcggtatctggacaccaactaccgcgaggatatctcgctggacctgctggcagagcttgcccacctgaacaaatactatctggcccacaccttccagcgggagtacggaatttcccccattacttacctgaaccgccgccgcattgaggagagcaagcatatgctgggcaacaccggttacagtctggcgcagatcagcgagttgatgggcttttcctctcccagctatttctcccagtgcttccgcaaggcggagggcatgacccccaacgaataccgccgtcagacgcggcagggaaaacgccccgccccgacaaaacggcatgaagtataacgaaaacgaggaatttatgatgaaatccgttaccctttctctgctccagtctgctgcaaatgcctttgattttggcgggcctgtgctctgcgatgctcaccactatggtgaggggcatatcaacgacacctttgtggtctggcgggaagatcattccaaacgctttattttgcagcgcatcaacacagatacctttactaacccggtgggcctgatggagaatgtctgcggcgtgacccggcatctgcgggcgaaaattcttgccgagggcggcgacccggcacgggaaacgctgaatgtcgtcccaactttgtcggggtcgacttgctatctggatgcagacggcggcgcatggcgtgcctacgactttgtagaagataccatctgtttgcagcaggtcggcagcgaaaccgacttccgcaccgtggccgagacactgggcaaattccagaaccagctggaggattacccggcctccaccctccacgaaaccatcgcccgcttccacgacacgcccaaccgctatgccaattttgaaaaagccctcgccgctgatgcactgggccgggcaaaaaatatcacgtcggaaatcgaatttatccatgcgagggagcaggactgccatgtcctgctggatcagctggcagctggcgaaattcctctgcgcgtcacccacaatgacaccaagatcaacaatgtcctcatcgatgccgctaccggaaaaggcatctgtgtcattgacctcgacaccgtgatgccgggactttcggcctacgacttcggcgattccatccgcaccggtgccaacgactgcgctgaggacgaacctgaccagagcaaagtccattttgacctgcatctgtacgaagtgttcgccaaagggtatctctccactgccggggcatccatgagcatggcagaaaaaaagagccttgcatggggtgcaaggctcatgacgctggaatgcggcatccgttttctgactgactatctggagggcgaccattatttccatattgctcgcccggatcacaacctcgaccgcgcccgcacccagttcacactggtgcggcagatggaagaggttttcgatcagatgctggaaatcgtctgcccggacaatcactgatttcgcaatctcctccattcggatacagcaagaagcatggacgctctccttttcgggggcgtccatgcttctttttacagcttatcgctatcgtctgtggcttttggcagggtgcgtccgggtggacgcaccctatttttttactatgcttcatcattttctgcgcgcagcatccggtatccgacaccaacatgggtctggatcagatgcggcgcatccgggtatcgttccaattttttgcgcagggatgccatgtaaactcgcaaggaagcaatgtcattttcctgcgtactgccccatactttctgcgtgagggaggtatgcgtcagcactttgcccacattatgcgccaacacacacagcagcttgtactcgatgggggtcaaatgcaattcattctcgctcagccagacgcagcctgccgagaagtcgatcttcaaaggaccattgacaaaaaccggactatttatgccgtcagaagccagcagattcaatcggcgctgcgttacacgcagtcttgccagcagctcatccacggaaaacggctttgtcagataatcgtctgcgccgttgtccagtgcctcgatcttatcagaatcttcgctccgggcactcaggacgatgatgggcaggttcgaccatgtgcggacgctgcggatgacctcgatgccgtctatatcgggcaacccaagatccagcagcatgatgtccgggttgtggctggtagtcatcatgatcgccgtttccccattggaagcagtcagatatttatagccgtgggttttcagggtcgttgtgatcagacaccgtacaggaacatcatcctctacgaccagaatggacggcttattcatgaatgttcacctcgctttgcggcaatgcaaaggaaaagacactgccattgggaatgttgtcacgcagggtcaatgttccgccgtgagccgtcaagatcgcacggcagaggggcaaacccagtccaaggctgcggtggctgtctgcgatgcggctctgcccggtataaaacatctcgaacacctgtgcttttgcgcgatccggaatgccgggaccgttatctgcaacgtccactacgacctgatggtctttccggtaagccgaaatctgaatgaccgaacccacgggggtgtatttgatggcgttatccaccagattgacaacgacctgcatgatcagccgtgcatccacattgaccaggaggatctcgtccccatactgtgttgtgatggtatgttcgcagcttttccggttgacatgatgcagagcttcttcgatcatttcgtccatcagctgcggcgagatctgcagattcatccgcccatcttcaatgcgggtgatggaaagcagattttccaccagaccgatcagccattgcgcatcgtcaaaaatatcggtgcagatcttgttccgggtctctgtatccagcgtttctccgttggaaagcagattgctggcattgccggaaatggaggtcagcggggtgcgcaggtcatgggagatcgtgcgcagcaggtttgcccgcagctcttcattccttgcctgcaatgcagcttgctctttttccagcgcgtttctgcggttttcgatggccagcgcaccttcacccagaatggaaagcagcacgctgttttcaaaggcatccagcggtttttcggacagatcgatcccgatcactccaaacacgccgcctccggtccgaagcgcaagataaagtccctttgcatccgggtagctatccgtgcctgcaccggaacgctttttgttggcaaacgtccagtttgctgcatcccgttcttccggtgcagaaaagatgttacacggcacttccccatcaatctcaaaaacctgttctgacccaagatctccgttttgttccgggtaaacgatcagactccggttcagcagcttcatcaactgggacgctgtctgagagaggatttcttcctcgctttttgctctctgtaaaagctgatttgtgtcaaacagtatttttgtacggaacgctgcctgcgcagacatttttgcatgatccttcaaccgcgttgtcagggtgcaggtaatgattgcagaggtcagcatcagggcaaatgtaacctgataaccgggatcatacgcatggaatgtcaggtatggctcggtcatgaagaaattgtacaatgctacactggcaacggaccccaacacaccgcaggtgtagccgctggtaaaccatgcggtgaacagcacccccagcatatagagcataataatattatagcgtgcaaagtccagttgtaagaaaaagaagccgatgagcgtgatgcagctcaggatgcctgcggtgatcagcagatcacggacagacggcagaagcggacgggtgaacagcttttttcctgagccgtagccgttctctgcagaagcatccgggatgatataaatatccagattgggtgcagtcaacgtcaatttttcagtcagtgacggtccactccagaaatggcggcgatgtacgctggagcgccccagtacgatttttgtaatgccggagatgcgggcaaactctgcgatctgctgcggaatgtcatccccgtagatcgtagaaatgtcggcacctgcctgctctgccatacgaatgtgctgctgcaagcgccgacagtcttcttttcccatctgatccgagtcaggcgtccggacatacagagctgtaaaggtcccgccaaacgcctttgccatcgttgctgccgtccgcacgatctttgcattggagggagaggacgacagacacgccagaatatgttcagtgggttggtcgttctgattcataaagatcacctgccttgcccacagtatagcacaatttgatggtcacgaccaccagccgcgtctttttccttcctgtcgaaggatctcccgtcgtatgtgatccagcgcatctgctgcccggaaaccactcaacatgactccaagaaccatcaataacaaagcgacatccatacgatccgtcctatctttttagagccggaaacacttctggatcgatgcgtatttccccaaaaccagcatactttcatcccggcacagctgcgtatccggcgtaatgctcatatcgagctttccgtcttttttcagtgcaagaatgttgatgttatacttttttcgaatattgatctcgccgattgtgcgattcatccattccggcggaatagtcacttccatgatggcgtggtcgtcctgcagctcgatataatccagaatgtgttcggagctatatcggatcgccgcccactttgccagctgcttttccgggtagaccacttcatccgcaccgttgcgcagcagaaacttggcttgtacatcccgctctgcacgcgagaccacaagctttgcgcccagctccttgagcagtgatgttgtttccaacgaactctgaaaattgccgccgatggttacgatacacacatcaaaattgccaacgccaagggaacgcagaaagtattcgctggtgctgtcaccgatctgtgcattcgtcacataggaaagcacagcgttcacacggtcctcattgctgtcgatcgccatgacctgatgacccagctcattcagttcctgtgcaatatggcggccaaaacggccaagcccaatcaaaagaatcgatttcatacttgtctcctttatccgattgcgatcttctcctgcggcagacgagagtgggcagggctgctgccaaatgccgcatagatcaacgtcaatccgccaacacgtcccaaaaacatcagtgcgatcagcaccccctgcgaaaggatgcccaactgcggcgtgatgcccaatgtcagacctaccgttgccacagccgaagcagtctcatacaaacagaccgacatcggcagctgctctgccgcagcaatgacaaaggctccgaggaagaacagcgtcaaatacatccctgcaatcgtggcagcattcttgaccgcagaactatctatgcgccgcccgaaaaattccgcatcttctctgcggcggaaggtcgcccacatattggccagcagaacggcaaatgttgtggttttcatgccgcctgccgtggagccgggcgaaccgcccaacagcatcagaaccaccatcaatgcctgtgaagtgctgcccatcgcagcaagatcagcggtgttaaagccggcagtacgaggggtaacggattggaacatcgacaataaaatgcgctgccgggcagagcctgccgtgaactcgaagcaataaaagtacagcgtcggcaataccagaagaaatgccgttgtgacaaggatcaccttgctctgcatccgatagcggtgaaagtcaaggcggtatgtacaaatgtcctcccatgtcagaaagccaaggccgccaaagacgatcagggccgcgatcactgtggtaagcaatgggtcacctgcataccgtgtcagcgaaacaaattttgcaccctctgttcccagcaggtcaaagccggcattgcagaacgccgaaatggaatgaaacagtgcataccagatcccgcgcaaaccataatcggcgcaaaatgtcggcagcagcagtgcagcaccggccaattcaaacagggcggtgatccgcagaataaagcctgtcagccgcacgatgccgcccatctgtggggcagcggtggcttcctgcatcgtgctgcgctgcttgagggagatctttcgcccggaaagcagcgcaaaggcagcaccaaccgtaatgacgcccaatcctccgatctggatcagaagaaggatcacgctctgcccaaaagccgaccagtagctgccggtatcctgtaccaccagtccggtcacacaaagggcagaggtggaagtaaacagcgcctcatggaacggtgtaacgcaccgctgctgtgcagcgatcgggagcatcagaagcaatgcgcccaccagatcaactgccgcaaaccctgcaataatgacctgaaaagaagaaaaacggtgctgcctgtaacgaggatattgaatcataaaagctcctttacctatccgtgtgcataaagattagcatggaatagataaaagagtcgtaaagaaaattgcagaagtataaagattccattaaaattaatcggccaacactaaaaatgtcggacatcgaattttccgaagaaaacaaataatccgaacccatctcctatcggaaacaagttcggattatttttgtttggtccgagtggcgagaatcgaactcacggcctcttgaaccccattgtgcttctctcgaaaacacaatgtacaatccgatactgcctagactcagtatcgttaaatttcaaatatattatatcattctgtttcattggatgtcaagacgtttcattccttttgtggtcaaattgtggtcaaacgaccccgacaaatgacttttctcccccagctaagttacatcgcgcaatttcgattttcatcaatcgaagttgcgctttttgtttgcacgaattatctataaggaggatttgtcaaccatgtcaatgaaccatcgttgttttttcatccttgacagaattgtatgacccttgactacttttacggacaggccggagaactcttttcgttcttccgcattccaaaggctcttttccaggagcagcggtttcaaaatctgtcaaccgatgctaaaacgctctatggaattctgcttgaccgcatgagcctttctgccaaaaatggatggcttgacaagcaagggcgagtgttcatcatcttcaccattgaggatgtcaagaggactttgtgttgcgcagacaacaaagcgatgaagctgttccgggaacttgaaaaatttggtttggttgaacgaaaacgcagaggattgggcaagccaagtttggtatatgtgaaaaacttttcgtcagacctttcaaatgagcgtgtccagaatcgtgaaaatcacgaatctggggctttcaaaaaagaatgtcaagacccacccaaatcacgatgtaataagaataaaaagaataagacagagcggaataatacgaatcctatcctctccgatgaaatggatgagatgaataatcgtgaactgctcgaagaatatttttcacattctttggagatagaccttcttctccggctttacccggatgatgaagatacaatctatcagatcgtgaattcgctggtggatacctgtgacagcaagcgcaagttcataagaatcgctggcgatgataagcccgccgaagtcgtgcgcagtcggttgaaaaagttgaacgcagaccacattcggtttgttttagactgcctttccgcaaacacttcaccgatacggaacatgaagcagtaccttttggccgcactgttcaacgccccaaccacaatgcagctctactatcagaacaaagtcaaccacgatttagcagctcggaggtgatgaaaatttccaaaaaggcaacaacgatagccgttatcaaccagaaaggtggcacaggcaaaaccaccacctgtgaaaatttgggcgtgggacttgcaatggagggcaagaaagttctacttgtggacgctgacccacagggttcgctcactgtcagtatgggctggcaagatccggatgcactgcccactacactctccactcttatgcagaaagccatgaacgaccagtgtattccacccggcgaagggattctgcaccatgcggagggcgttgaccttatcccggccaatatcgaactggccggactggaagtggctctggtgaatactatgagtcgggagaaagtgatgaaacaggtgttggaaagcacaaagcgccagtatgactatatcctgattgactgcactccctctctcggtatgctgacggtcaatgcactggcggcggcagattccgcgcttattccggtgcaagcgcaatatctttctgcaaaaggtctggaacagcttttgcagaccgtgcagaaagtaaggcggcagataaacccgaaactgaaaattgagggcatcctgctcaccatgacggacagccgcacaatctatgggcagcagatcagcaatctgattcggcaagcctacggaaagcatctgaaggtgttcgagcagacgattcctcgctctgtccgtgccgccgaaaccagcacgaccggaaaaagtatcttccagtatgaccccaaaggcaaagtggcagaagcctatcattccatcgcaaagggggtgttggccgatgccgaaaaacggattaaacgtcagtctgaacagctacgatgatattttttccaccgaagaagcccggcaggaagaacagcgcgaacaggtgcagcaaatttccatcgaggaactgcatccgttcaaagaccatccttttaaggttctggacgatgaagctatgcagcatacagtggaaagcataaagctgttgggtgtcacaaatcccctgattgcccgtccacgcccggaaggtggctatgaaattatttccggccatcgccgccagcacgctgcacagcttgccggattgaaagccctgcctgtcattgtccgtcaaatggatgatgatgccgccgtcctgctcatggtcgattccaaccttcagcgcgaacagattttgccgagtgagcgggcatttgcctacaagatgaagctagatgcactaaaaagacaaggtgctaggtcagatttaacttctacgcaagttgcgcagaagttatctgttgaaaaagtcggtgaagatgctggtgtaagtaaagacacaattcgccgctttatccgcttaaccaaccttatcccggaacttctggacatggtagacgaaaagaaaatctcatttaaccctgcggtggaactctcttatcttgatgaaaaccagcagcgagattttcttgaagctatgtccgacacacagaactctccatcactatcacaggcgcaacggctcaaaaagctggctcaggaaggtcatttctcgtatgacgttgcctttgccgtgatgggagagccgaaaaaggacgaattggacaaggtggttatcaaaaacgatactctgcggaaatattttcccgaaagctctactccgagagaaatggaagaaaaaatcatcggacttttggaggagagtaaagcagaaaaaattgtattcagaagtgatgccctaaaaaaatattttccgagcagctattcgtcaaagcaaatcgaagattccatcattaagctgctggatcagcgtttgaagaagcgcaaacatgaagccgaacgctgaacatcgtttgaaatgtaagacccgatggggtctttttcttttgcaaaaatggaggaaaaacgcctatgaacaataccgcttctcgtattatccgttccgaggaaattactattgatatgcgcatctgcaccattctggcaggtggcaagaagcccggtgaagtctactttgcagccattgcgacggatatggaactgactgttattacactggatgaagcccctgacattctgccctgcttcgatgaaagcgatgccagcatccatctccccgacacttcgctgctgctcacctacaatccggcacaggttctgaagatggcgggcaagcgttacctgactggcccggtcattcttgtacgcgccaacatggacgggaacttcatttcgcttaccattgatgacgtgtaccgtttccagaagtttctgtcgagccacagcgttacacttatggcagacgatcagaagctgccctgcatctgcatcgactgaggtgtatcatgctgaattttttcatcggttttgcattttttgagttcggcgcactctgcggcttcttcgtagcagctttgatgcaggcagcgcggtatggcgaaatcatgctggacagagaggaggattcgcatggcagaaaacaccttgtcggtgctggaaattgcaccgggacagtatccgaagcagattgtaattgacaacgacctgaaagccttgcagcaggcagttgatggcccgattgctgcaagctatcctttcgaggatcctgttgccatcgtgtataacgatgagggcaagctgactgggctacccctaaatcgtgccttgcgtgatgaacatgggcagatgtacgatgctgttgccggaacttttctggtggttgggctgggagaggaagattttgcatccctgaccccggaactggcacagaagtacgagaaacattttcatcagcccgaagcctttatcaaattgggaaagcgtctgttggttgtacctgttcccgatgaagctgtccagtccgcagaaccaaaagcgcatattaagccctccgcagagcatgaccgctaaagaaaaaatttccgcaggaggtggtgaaattgcaggaagaagtcgaacagaaaacattcaacatcgtggtgtccaccacgaagctgaccgctcggacgattttgaatgctggccgcacagcacttcgggagtatcagtcaaaattactggccgataaatcaagcggcaaacagagcgtccgtatgctcctgcggcagaaccggggtgtttccagcgtggaaatcgacaaaaccaacattaagggttttgagcggtacgccaaaaagtacggcatcgactatgccatccgcaaggacagctccgaagtgccaccccggtatctggtctttttcaaagccccggatgctgaagcgttcaatgcagccttcaaggaatactcggcatccctgctgagcaaaaccaaacgtccctctgtgctggaaaagctgcacgaactggtgcaagccgcagcggaaattcccggcaaagtccggcacaagcaggaggaacgcggcttatgaccacaaaaaagctaacgaaactgcttgctctgtatctgccctatatcctgctggggctggtggcaaccaactttggcgaagcgtggcggctggccgagggcaaggaactgggcgataaaatcatggcgatgatgggaactttcccggtggcatttgcaaatccgctgcccagtctgcatccgtttgaccttgttatcggcctgtgttgcggtgccgggatgcggttggcggtctacctgaaaagcaaaaatgcaaagaagtacaggcacggcatggagtacggctctgcccggtggggcaatgccaaggacattgaaccgttcatggctcccaagttttccgacaacatcattttaaccaaaacagaacgtctgatgatgagcaatcgtccacccgaccccaagaatgcccggaacaaaaatgtgctggtggtcggcggctccggctctggcaaaacgagattttggctgaaaccgaacctcctgcaatgtcacagttcctatgtggtcaccgatccgaaaggtacgattgtgcttgaatgtggacaggccatgctgaaaaacggctataaggtaaaagtcctgaacacaatcaacttcaaaaagtcgatgcactacaatccgttcagctacgtccacagcgaaaaagacattctgaaattggtcactacccttatgaccaacaccaagggcgaaggcagcggcggcgacccattttgggagaaaagcgaacggcttttgctgactgcgctcatcgcttatctgcattatgaagccccggtagaggaacagaactttgcgaccttgctggaaatgctcaacaccatgcaggtgctggaggacgatgaggaatatcaaaacccggttgacctcttatttgaagatctagcaaaaacaaagccgaacagctttgcaggacggcagtacaaactctacaaattagctgccggaaagaccgcaaaatccatcctcatttcctgcggtgctagacttgcaccatttgatatccaagaattgcgcgatttaacgatgtatgacgagctgcaactggacacgctgggcgataagaaaacggctctgttcctcatcatgtcggataccgattctacgttcaatttcctgatttcgatggtctacacccagcttttcaaccttttgtgcgacaaagcggacgatgtgtacggcggcaagctgcccattcatgtgcgctgtctgattgacgagtgcgccaacattggccagattcccaatctggaaaagctggtggcaaccatccgcagccgtgagatttcggcttgccttgttttgcaggcgaaaagccagttaaaggctatctacaaggacaatgccgacaccatcatcggcaatatggacagtcagatttttctcggcggttcggaacccggtacgttgaaagacctgtctgaaatgctgggcaaggaaacgattgattcgttcaacacttcggacacccgtggtaacagccccagttatggcacctcgttccagaaacttggccatgaattattaagtcgagatgagattgctgtgctggatggcggcaagtgcatcctgcaactgcgcggtgtgcggcctttcctctcggacaaatacgatttgaccaaacatccgaactacaagctgacttccgattacgaccccaaaaacacgttcgatattgaaaaatatctgaaccgaaaagaaaaaatctaccccggtgatgaattcatcgtggtggatgccgattcgctcccgtctgcctgatctggtaggcggttatatttttacccggccagagaggtacaccagcaagctaactttcgccgcagttcgcggttcaaatatacggtttcaggtgtgtacggacggtctacaagttttcaatgataaaggagaaacggctatggaattttttaacagtgctatcgaagtcctccagaccctcgttgttgcgctcggtgctggccttggcgtttggggcgcaatcaacctgctggaaggttatggtaacgataaccccggcagtaagtctcagggcatgaagcagctcatggctggcggcggcgttgctttggtcggcattaccctgattcctctgctgagcggtctgttcggctaagagccgcaggcgggtttatcccgcctgtacatacgcaatcgcttcaattcctgctgtggataacagcccctattataataggaagcgaattgcagacgaatacccacccatcaacgaaaggcggtgctattatgcagcttctgacccacattatttttctcctgaacgtattgaaaaacatcatcaaccacttcagctaaggacggtgactgctgaatggaaaccgttctcaaagccattgccgactggataaagggcatcctgacggctggcatcatgtcaaacctgtccgggctattcgatgctgtgaacgagcaggtcggtgacattgcacagcaggtcggcacacggccatcggcctttgaaccgcgcgtttttgcgatgatcgaatcgctttcccgaaatgttgttctgccgattgcgggcatcatcctgaccttcatcgcctgttacgaactgatcgagatgataacccagcacaacaacatggcgcagtttgagccagcacttatcatgcgctggatttttaagactgctgtttcagtctggttcatcagcaatacctttgacattgtgatggcggtattcgacctgacacagaaagtcgttgctgattccagcggcattattgctggaaatacccgtgtcaatgaaatcggcctgtcgatgctggaagccagcctgatgcagatggatgtcggcccattattcgggctgtttttgcaatcgttcttcatcggtatcaccatgaggatactttcaatcgtcatttttgtcatcgtatacgggcgcatgattgagatttactgcatggtgagtcttgcaccgattcccatggcgacatggggcaaccatgaacagagccacatgggacagaattacctgaaatgcctgttcgcactgggatttcagggctttctcattctcatctgtgttgccatctatgccgtgctgatacagaatgtggcgatttccggcgatgccatcggctccatctggagcattgtcggctataccgttctgctctgtttcagcctgttcaaaaccagctcggtcacgaaaagtgtgctgggtgcacattaaaataggaggtgtgaattttggctgcttatatctctgttccccgcgatttgaccaaggtgaagtccaaagtggctttcaacctgacaaaacggcagcttatctgcttcggcacggcggcactgatcggagtgccgctgtttttcgttcttcgggattccggcggcaacacagccgccacccttggcatgatggccgttatgctgcctgcattttttctcggtatgtacgagaaaaacggtcaaccactggaaaagctgctgtcgcactatgttcaggcgcggttcctgcgcccgaagattcgaccttataagacaaacaactactatgcgattttgatgagaggagggtcagcccatgccgttttggaaaaagaccgataagggcggcaagaaaaagccgccgaagcccgctgttccccggacagcacagcagtccatccccatgcagcggatgttcgaggatggcacttgccgggtgaagccgaactattatacccggacgattcagtatcaggacatcaattaccagcttgcccagcaggaggataagactgcgattttcgaggaatggtgcagttttctgaacttcttcgattccagcatcaagtttgaactgtcctttgtgaacatggcaacggacagcacagagtttgagaagagcatccgcatcccgtaccagaaggacggctttgacgatgtgcgcgccgagtattcccaaatgctgcgtcagcagcttgccaagggcaataatggtctgaccaagaccaaatttatcacctttggcgttgagggtgagagtatgcggcaggtcaaggcacggctcgaccacatccagaacgaccttttgaacaattttcacaggctgggtgtgccggccaagccgctgaacggtgccgagcggctgaaactcatgcacgatatgttcaacatggacggtgcgtccaagttccattttgactggaaagacctcgtgaaaagcggcctttccgtcaaagatgccattgcacccacggcttttgccttcaaaaattcccggacgttccagatgggcggcatttactgcgccgccagctttctgagcatcacggcctccgacatcagcgaccagcttttgaaggatttcctcgacatggattccagccagatcgtcaccatgcacatccggagcgttgatcagaatcgtgccattaagaccgtcaagcgcaccatcaccgaacttgatagaagcaagatcgaagagcagaagaaagctatccgcgccgggtatgatattgatatcattccgtccgatttggcaacctatggccgggatgccaaagccttgctgaaagaattgcagagccagaatgaacggatgtttttggtgacattcctcgtccttaacactggccgcactgagcaggaactggaaaacaacgtttttcaggccagttccatcgcgcagaaacacaactgcaatctgtgcagactggactaccagcaggagcaggggcttatgtcctctctgccgctggccgacaatcaaatcgagattcagcgcggcctgaccaccagcagcactgccattttcattccgtttaccacacaggaattgtatcagagcggaaaagaaagcctgtattacggcctgaacgcactttccaacaacctcatcatggtggacagaaaaaagctgaaaaatcccaatggccttatcctcggcactcccggctccggcaaaagtttctcggcaaagcgtgaaattgcaaacgcctttttggtcacagacgatgatattatcgtgaacgaccccgaaggcgaatattctccgctggtaaaccgactgaaaggtcaggtcattaaaatctcgcccaacagcacccagttcatcaacccgatggacattaacgccaactattcggaggaagataatcccttgtccctgaaagccgactttatcctttccctctgcgaactggtggtgggcggcaaggagggtctgctgccagtggagaaaaccgtcattgaccgctgtgtgcatctgatctaccgcaaatattttgctgaccctcgcccggaaactatgccgattctggaggatttgtacaatgccctgctccagcaggatgaaaaagaagcccatcatgttgccacggctctggaaatctacgtcaaaggcagtctaaacctgttcaatcacagaaccaatgtgaatgtcaacaacagaatcgtctgctatgacatcaaagaactgggcaagcagatgaaaaagttgggtatgcttatcgtgcaggatcaggtttgggggcgtgtcaccgccaaccgcagcagcggaaagtccactcgatattatatggatgagatgcaccttctcttaaaagaggaacagactgcggcttattccgtggagatttggaagcgttttcgcaagtggggcggcatcccgactggattaacgcagaacgtcaaagacctgctttcttcgcgtgaagtcgagaatatttttgaaaactcggacatgatcatcatgctgaatcaggccgctggcgaccgccaaatccttgcaaagcagttgaatatcagcccccaccagctttcctatgtgacccactccggcgagggcgaagggcttctgttcttcggcaatgtcattctgccgtttgttgaccgtttcccgactgaccttgaactctaccgcattatgaccaccaaattgggtgaagtgtcggagggtgcgcagaaatgaatgattcaaagctgaatttcaaggaggaaacgtcagcaaaaaagacccgttctcccccgaagaaagcgagggtcgaacagtccacgtccaaaaagaaaaaactgaaacttgatgcagaaaaggccgcagagaaagcccagcatctgcgtttcggcaaagccgaactgaccccggatgaattgagccgcttgagcaaggcgcagaaacgtgagatgttcgccgcccatgccgcccggtctgcggcgcaccgggaaatcgaccagtatgaggaagataatgtcggtgtgcaggctctaagcgagggcgaaaaaactgccgggaatatccgggacatttccaaaagccgttatgcccggaaactgaaaaagaaagccaagatgcaggataaaaaaggcaccaaaaccacaaaatcttctgcacaggaaccaactgtggcacaaaatgcaggaggttccagcatcggcaccagcgagggcagctccaactggctctcccgatggaaacagcggaaggaaatccacaaaagctactatgctgctgcccggtcaggcggcacagcaacgcagaccgctggcggcaaaaaggctgcatctggcggcgcatctgtggcacggtctggtgtagagcaagtggtggacaagggcaaaaatgtagtcagcacaacagtaaacggccttatgactgcggcgaaaagcaacgcacacgttctggtgatcgtgggcgtttttgttttgctcattcttatggtcatgtctggcttttcctcctgcggcatcctcttttcgggcggcacacaggtgtccgggcagaccatctacaccgccgaggacagagatattcgcggtgcagagcaggactacaagaagctggaaaaggaactggacaaaaaaatcaagcgcactccccaagaccatccgggctacaacgagtatcagtaccaccttgaccccatcgagcatgacccgtggcagttgacctcgtttctcacgactctgtatgatgattacacccggtcagaggtgcagggcaaattgcaggagatttttaagaagcaatataagctcaccacatgggtcgaggtacagatacggtacaaaaccgtgtgggtcatcagcccggcaggaatcccggttcctacgcaggtgccgtatgagtacaagatttttcacaccaagctggaaaacaaaggtctggaggtcgttattcgggaagaactaacagacgaccagtggaaacggtatgagatttttcaggacacactgggcggtcggccttacctgttcaacggcggtctgccgcccggtggttcggatggctccggcacacccggcatcgactataccgtccctgcggaagctctgacggacagcgagtttgcggctatctacgaggaagcaaagaaatacgttggcacaccctacgtctggggcggctccaccccggaaaccggcttcgactgctccggctacgtttgctgggtctacaaccagaacggctacgatgttggccgtactaccgccaacggattatggcagaaaagtcagcacatttccgaagcagaagccaagcccggtgacttggttttcttcaagggaacgtatgacactcccggcatgagccacaccgggatttatctcggcaacggcatgatggtgtccgctggcgaccccatcaaatacgcaaatattcattcgtcctactgggagaaacatctcgcaggatttgggcggctttcaaaatgaaatggagggtttacgatgagcgaaaaattggaaaaactgcgcgcaatgctcgaaaaagagaaagagcggcgcatcaagctgaacaaccgcatcgagattctggaacggcggattcaggaggccgaagccgccgaggtgaacgagatggtgcgcagtgcaaaggtcagcccggaacagcttgccgccttgctgcggcagtctgccaacgccaccccgaacccggctacgctggccgcagtcggtgctgtatttgcaaaggaggatgattctgatgaagattaagagatttggcgcgctgctggtgtcggcagtgctgtgcatcggcatggcggctccggctttcgcctttgagggcgatttcaccccggtggaacagcctgttctgccggaaatcgtggaggaggaagatactgtcaccatcacggatgaagcttccggcgcactgaccccggagggcaatctgacgctggtggacgattactacacgaactattccgatggcagcggacagcagtttatcacgatggtgtcaaagtcgggtgcaacgttctatctggtcattgaccgcaatgccaaggggcagcagactgtccactttatgaatctggtggacgaagcagaccttttggctctgatggaagaagatgctgccgatgcttataccgctgaaaaagaagcagagaaacaggctgaactggacaagctgaaagccgaggaagaagccaagaaagccgcagaagaagcagagaaagcggcagatgccccgaaagaaaacaaggtcacaaagtatgctgcggcgtttctcggtgtcgttgccataatcgcgctggctgctggcggtggcttctatttcttcatccagcagaagaacaaaaagcaggctgaaaaagaagccatcgacccggatgcagactacaccgaggacaagggcgactttgagattcccccggaggatgattccgatgaggacacttctgaggaacaggacgtgacacctatctgattttaaggcggcgttccgccgcttacatatcgaatccgaaatagattggagggattgtttatcgcaaaattgatcgtgaccgaaaagccgtccgttgccatgtcttacgccaaaattttaggtgtgcatgggcggcaggatggctaccttgagggcaatggctatcttgtaagctggtgtgttggccatttggtagaactggctccgcccagtgcctacggagagcagtatgtgaagtggaacattgccgacttgcccatcctgccggagaaatggcagtaccttgtgtctgccagcaccaaaaagcagttcggtatcctgaaaaagctcatgcaccgttctgacgtggagagcatcgtctgcgcaacagatgcaggacgtgagggtgaactgattttccggctggtctatgaacaggccgggtgcaaaaagcccttttcccgtctttggctgtccagcatggaggattccgctgtccgggagggctttgcaaatctgaaatcgtcaacagaatatgatgcactgtatcaggctgcactctgccgggaacgtgccgattggatggtcggcatcaactgttcccggcttttttcctgcctatatggtcggccactggctgttgggcgtgttatgaccccgacacttgctatgacggtagaacgtgaagccgctatcgccgcctttatgccggaaaagttctacacggtggctctggaactgacgagcggctttgtagcatccagccgccgtatttcggaaaagacggcggcggaaaacctgcttgcggagtgcagaaaggagatggtgtccacgattcagaaaatcacgcgcaaagaaaaagcagaaaatccaccgctactctatgacctcaccacgctccagcgcgatgcaaaccgtctgctggggtacagcgcacagcagaccctgaactatctgcaaagcctttatgagaagaaacttaccacttatcccagaactgatagctgctatatcactgacgatgatgaggatatgctggaagaacttgccgaggaattggaagattttctcggctttgtcagcgaggatgcagacgatgatgttccccggacgcggcgcaccgtcaatcggcagaaagtcaccgaccaccacgctatcctgcctactcgtagtatgctgcaagccgatttggatgctctgcccaagggcgaacggaacattttgaagttgattatcgccagaaccttgatggcagtcagcaaacctttccggtatctggaaactctgctcaccaccgaatgtgcaggcgaagaatttaccgcaaacggcaaagaaatcctggacgagggctggaaagcggtggagcgcaaggtgctggccgatattctgagccgtaaaaaggagttcaccgctctgccgcccgtggaagaaagtgagtgcggtatcctcaatgcggaactgaaagaggggcaaacgtcccctccgaagcattttaccgaagatacgctcctgcactcgatggaaaccgccagtgcagaatccatgccggaagatgcagagcgtcagggcatcggcactccggctacccgtgccgctaccatcgaaaagctggtgcagaaaggttttttggagcgcaagggcgacaagaaaaccaaagtactgctgccgaccgacaagggcaaagcccttatcaccgtgatgcccgaagaaatccagtccgctgatatgaccgccgactgggaaacaaaactgctgcgcgtagagcgcggcgagatggagccagaaacatttatgactgaaatcaacgatatgatctcctcgctggtaaataccaccgaggccgtgaaaggagcgagtgcgcttatgaaaaataaagtgatcggtgtctgcccgaactgtggcaagtctgttgtggagcgcgaaaaaggctggttctgcgagaaccgcgagtgccgttttgtgctgtggaaggataacgctttcttcaagcggctgggcaagcggatggatgctcatgtggccgacaagctgctgcgggatggccgtgtccgtctgaaggactgcaagagttccaaaggcaagacctacaatgcgactgtcctgctgtccaccgaagccgatggccgcagcaagttttcgctggaatttgagggtggccgctgatggagcagaacaaggaagcagtctacctcatcaacaatgaacgctatctgcacctccgggaaaacggtgcgggcgttggctttgccacctacaacaaggtaacgggcgaaccgttagaaagcgggcagatttccgaaaagaatctgccgcccgatggcagaaacgccattgccgccgcccggaactggtatctctttgaactttcggatgatgaccgcaaggctatccaacttgaaagcgtaaaaatccttgaaaccatcccacaggcgggcatcggcaggcggcgcatctgggaacccgaaacgatactgccggacattcggctcatcaacagctattacgatgatctccaccgagttcccgatggcggcgtgattcaggtggactacccggatggccgcagttttacggcacagctggaatatctggacgattaccactttgacatgggtggtctgggcaatgtgttccacatctgccagtttgctgaggtgatggaacgcaatggagccgactattacccggaaattcagacacaggacgaacagggcgcatgggagctgggcggcaagggttatcttgccatccagtccaccgatgagggctgggactacactatctaccacagcgattattctgtgctggatggcggtcagatcaatgccccggaactgacgattcaggaagtccgggagcagattttggaagcgcaccacatggaaaaggggcggcggctgttgcaggactacgattttgtgatggacagagccgccgaagccgaagaactggggctgaaccagcggcattctacgctggaaaaactggctgctcttgctggcgcaaaagaaaaatgcgatgccccggagtgcagccctgccgggtgcaggaaagtgagggatgcccatgaactttaacggcgaagaactgatgctgatgatcctctacaatcccggcacccggctggggctgatgcaggagctgcggctcatgcagtgctacctgatgcccgatgaaaccgccctgcgagaattgtccgaacaggtcattgaaaagctgaagctgctgaccaatgccgagtttgccgagttagaatttccgctcgactaaatttttgccgcctgcgggcggcttacataataggggttacaccaaaagcaattatatggtataattatcttatcgactttacgacttaaggagattttttatgggagaattcgatttcacctatgtgttgcccaagaacttctcaaggcgggtagttcaatatttggaacagctcgaatcgccaaatgttgcaaaggcttttcaaaattgcacatacgattatgaagatttgggtcttgcctactatgttggcatgaaaggcgacaactgggataaaaaggcattggactttaccgttgaaggttctccccgcgacatcgcattgctaaaatcgaaagaacatacactaaaagaatctatcagcaaatccctcaagtcctctgaatccggatttttactcaaagaaatttattactttgaatccgaaagtgtagaacacatacccttatcaaatgctgcaaggttaaatgccgatatagaatcgtcacaggctgtccttcaagatttgattcagatgggacaacgcttttgttcaaattgtgcatttaacagttccagttctgaaaacagcatgaatgactattttcgagatttgctttttataaaagggtataccgaagtaaaagaccaaactcgacatggcttatccgtaaataaaaaagattccgcggaagtagatatcttgctaacaaaagacggcaaagagattgcaatttatgaaggcttaaagttatctagcgttagcaccacatacattgacatccatataaacaaggcaattgtaaattataatgcccttggaactgcaacgtttattgttgcttatgtggatgttgcagattttgactctttttggaataaatatttttcttatttgcagagttatagttttcccattttagtaaaatcacccattgaagcgtctccttatccaaatgcggcaactcgcgtagcaagcacaatattatcaagagacgattacgattttcctgtctattttattgcttttaagattccaagataatcttccatattcaactattagcggacaacctcaacagttgcccgctctttttataccctaaaatcggaaggaggaacgcaatgccaaataaaacgcaagaatacctgaaccttgcccagcaaacggcaaaggaactgacccgatattgggaaaactggacggactacctgaccactgcatcccggctgtacaagtacagctttgcagaccagctcatgatctacgcccagcggcctgatgccactgcctgcgccagctttgacatctggaacaatcgcatgaaccgctatgtgcgaagaggttccaaaggcatcgccctgttagaccagtccagcagtgtcccacgtctgcactatgtctttgatgtgagcgataccggggtgcgctgcaattctcgtgaccctgaggtgtggcagctcggccctgatctggttcagcctgtgtcagaaatgcttgccagagaatacggtgtccggcatgaacgaatcacccagcagatcgcggacatttgcggcaagctggtggattgctattgggataacaacagcggtgacattctcgacatcgttgacggctcgttcctgatggattatgatgaagccggacaggagttccagttcaaatctgccgccgcaatcagcatcacctatgctgttctcgaacgctgcggctttgagccggaaggtcattttgactgggacgattttcaggcgatcttctccttttccactcctgccgctgtgtatgcactgggcaccgcagtcagcgagtgcagccgtgagctgctgcgcagcatcgaaagaactgtaaagacgaccattcgccgtcgtaacgtagaaaggagccaatatgaatatgaacagcaggaacgtgacctactcgaaagtcggagattatctgcttccgaacctgaccctgccccagcaggagaaagcattgggcaagtacgggcgactgcgccggacttacctgatgaagcatcgcccggtactgtacaactcgatgcttctgtcgggaactctgcatccgcacctgttggaagtggagcagagcgcggagagccggatacagcagaccatgcagaagctgctggagcagaatccggctccgaacaaagagcagcatcagatggagtgggtgcagcacatgaacagcctgaacgcacaggccgaggaactggtgatgaacgagctgatttacagctaagtttcttcgacacccacattcctaccgaagcgaaacaaattgaatccatcgaccaagcggagagcgaaaaatcgccctccgctttctctttgtcacaggccgacattgaaaatgctctgcggagaggctccaactttgaaaacagcaaacttcgcatctggaaaatttatcagttgcagcctgaccgaaacctccgggcaaaagctcttgccaaagaatatgctccaaacggacccggtggctcctcgcacacctatctggatggaagtcgcggctggcttgaccatgacagcaagggcttgacgtttgaacactatccagaccaccagaaaactcttcttcgctggaatcaggtcgaaaagtatatcgacctgatgattcagtctgaccgctatctgtccgacaaagaaaaaagaatcatcgactttccccttgaactgaacgacaccagtgctgccgaatacactgcattaaaagagcagtacccggacactctcattggttttgaagctggcggcaattttatgttctatggcgaagatgccgccaaggtcgcaaaaatcatcaacagtgctttgttcatgagaaacactgcactgggcgaagttcaaatcacgggctttctccctagcttatgggcaaaaagagcaaaagaattgtggtctgcgggcaatgatgtgtaccttgccgggttaaacgaggatggcactcaccaccagaccaagcacttgcgcaaagaggactatctgcccatcggctccgttatcaatatggatgaccggaaatttcgggtcgatagcgtggattttgacaaggacaaagtttccttgcaggatatggctctggccgatgcccggatgccgattttccgggaagagccgctgactgttgtccgggaactgtacgaacagcaggatgaagcccttgatactgctccagaaaaaactcccgattacaatgtcggtgattccgttgttgtagaccttccaacccgaaccatcgagggaactattggctatgtaggcgaaaccgatgtgcgcatcgacaccagtgcacagggctattcgtggagcaatgaggtactgaacaagcagcagttcgaggatggactgcggcaggatgagccggaactttccgatgaagaactggataagctgcccacctctgtggaagttaacggcgaatggcagactttcccggatgccgctgccgcagacaaagctctgaacgccgaacctgtgccggaagctgccggaaacttccacatcacggacgatcatctgggcgagggcggcgcaaaacaaaaatatgcccggaacgttgaagccatccgcaccctgttccagttggagcaggagcatcgtggagccaccgccgaggaacagcaggttctttcgcagtatgtcggctggggcggtctgccggatgtctttgacccagacaagggcaactgggcaaaagaatattccgaattgaaaggtctgctttccgaggacgaatatgctgctgcccgtagttccgttctgaacgcccactacaccagccctaccgttatccgcgccatctatgatgcagtcgagaaaatggggttccgcaacggcaacattctggagccgagcatgggcatcggcaacttttttggtatgctgccggacaccatgcaggacagccgcctatacggtgtggagttggacagtgtcacaggccgtatcgcccaaaagctctacccggatgccaacattaaagttgccggatttgaaaccactgaccgccgcgacttctatgaccttgcagtgggcaatgttccttttggccagtaccgggtaaacgacaaggcgtacaacaaattaggtttcagcatccacaactatttcttcgccaaggccatcgaccaagtgcgtccgggcggcatcgtggcattcgtcaccagtcgctacacgctggacagcaaagattcttctgcccgcaagcacattgccgaacgtgctgatctgctgggtgctatccgtctgccgaacactgcgttcaaagcaaacgcaggaacagaagtcgtcagcgacattatttttctgcaaaagcgtgaccgccccatcgaccatgaaccggactgggtacagctcagcaagacggaagatggctttgccatcaacagctattttgtagaccgcccggaaatggtgctgggcgaactgaccaccgaaagcacccaatacggccacgacctgactgttgctcccatcgagggcgcagtgttggcagaccagcttgccgaagcggtacagcatcttgagggacagtacaccgaagttgaggtcgaaacaccagatattgcggatgcggaaaatgagcggcacattctcccggctgacccggatgtgaaaaacttctcctacaccgtggtggacggtgaggtgtattaccgggaaaattctgttatgacacaggtggaactgtccgacactgccaaaggccgtgtgaccggaatggtggaactgcggcagatcgtcaacgaacttatcgaccagcagttgaacgatttttcggatgccgacatcaaggcaacgcaggaaaagctgaatgctgcctacgattcctttgctgcaaaatacggcttgctgaatgaccgcaaaaacggcagattatttgagcaggattcctcttactatctgctctgttcactggaaaatctggatgagcagggacagctcaaaagcaaggcggcgatgttcactaagcgcaccatccgcccagaacgcaccatcaccagcgtggacactcccacggaagcccttgcagtttccatcggagagcgtggccgggtggatttaccctatatggcagagttgctcggtactcccggcgagtatgggcgcatcaccagcgaactgtccggtgtgattttcaaagaccccggcgcagaccccaccgacccggaagcgggctggcagatggcagacgaatacctgtccggcaacgtccgggcaaagctgcgcatggcacagcttgccgccgaaaccaacccggagtttgcggtcaatgtcaccgcactggaaaaggcacagccgaaagaccttgaagcgtccgaaattgatgtacggctgggtgcaacatggcttccgcccgaaattattcagaagttcatggcagaaacgttccagattccctactatctgcgccatgcagtcaaggtgagatattctccctataccgcagaatggcgcgttgagggcaagtcggctatgggcagaggtgacattatctcctccgaaacctacggcacatcccgcgccaacgcctacaagattctggaagacacactcaacctgaaagatgtacgcatctatgacaccatcgaagatgaagaaggcagaccgaagcgcatactgaacaaaaaggacaccatgctggcacagcagaaacagcaggtcatcaaagatgctttcgccaactggatttggcaagaccctcagcggcgcatttcgctggtgcggcagtacaacgagttgttcaacagcggcagaccgcgagagtacgatggttcccatatccactttgtcggtatgaacccggagatcaccctccgggaacaccagcgcaatgccattgctcatgtgctttatggcggtaatacgctacttgcacacgaagtgggagcgggcaaaacatttgaaatggcggcctccgcaatggaagccaaacggctggggctgtgtcagaaaagcctttttgtcgttcccaaccatctgacggagcagtgggcttcggagttcctgcacctttatcccaatgccaagctgctggtggcacggaaaaaggattttgaaacggccaaccgtaaaaaattctgcgccagaatcgccaccggggactatgatgcagtcatcatcggccacagccagtttgagcgtattccgctgtcttatgaacggcaggagcgcatcattcaggagcagattgatgaaacgcttgccgccatcgaggaactgaaagccaatgctggcgaaaatttcagcatcaagcagatggaaaagacccgcaaaacactggaaaccaagctggaaaagctgcgctccgatgagcgcaaggatgatgttatcacctttgagcagttgggcgtagataggctttttgtggacgagtcgcatttttacaagaaccttttcctcacgacaaaaatgcgcaatgtcgcaggtttatccaccagcgaagcccagaaatccagcgatatgttcggcaagtgccgctatctggatgagatcaccggcgggcggggcgtggtgttcgccacgggcacgcccgtgagcaattccatgaccgaactgtacacggtcatgcggtatttgcagtacagcaccttgcagcagaaaaagctgacccacttcgactgctgggcatccacctttggcgagactactaccgccatcgaacttgccccggagggtacgggctaccgggcaaggacgagatttgcaaagtttttcaacctcccggagttgatgtcgatgttcaaagaggtggctgacattaaaaccagcgaccagcttcatctgcctgtgccggatgcaaagtttgaaaccgtggtggccaaaccgtccgagatgcagaaagaaatggtgcaggaactgagcaagcgcgccgcaaaaatccattctggcgcagtggatgcttccgaggacaatatgctctgcgtcaccaacgatggccggaagattggtctggatgttcgcctgatgaatcccatgctgccggacgaccccaacagcaagctgaacacctgcgttcggaacgtgctgcaaatctgggaagatggcaaggagcagaagctgacacaacttctgttctgcgacctctcgacaccaaagaacgatggcaacttcaacgtctacgatgatattcgcaaaaaattggtcgccgccggggtgccggaaaacgaagttgagttcatccacaacgccgacaccgaagcaaaaaaggccgcattgttctccaaagtacgctctggcgatgtgcggattctgctgggcagcaccgcaaaaatgggagccggaacgaacgtccaacagcggcttgcggcggtgcatcacttggacgttggatggaagcccagcgacatgacccagcgcaacggtagaattatccggcagggcaaccaaaataagcaagtccagatttataactatgtcacagaaggtacgttcgattcgtacctctttcagacccttgagaataaacagcggtttatctcgcagattatgacttccaaatctccggtgcgctcctgtgatgatgtggacgaacaggcattgtcctatgcggagatcaaggcattgtgtgctggaaatccgctcatcaaagagaagatggatttggatgtgcaggtcgcaaagctcaaagttctgaaagccgaccaccaaagccagaagttccgtctggaagataagctgctcacaaaattcccggctgacattcaggaaacgactgcctatattactgggttgaaatcggatgcggaacttgccgccgtgcatccgcaggagaaagagggcttctgcggcattaccatcaaaggcatggcctacgatgagaaaaagactgctggtgagcggcttctcctcgcttgctccgaactgcccaacagtgaagaaaaagtgatcggcagctatcgcggctttgaactgtccctgcggctcgacacctaccacagcgagtatcaggctcttttgaaaggccagcgaaaatactcggtagcactgggcaaagacccactcggctgcatcatccgtctggacaactctctgaataatttcccggagcgcatcacttctgccgaaaacgaactggccaccctcaaacagcagcaggccgcagcgcagatcgaagtggagaagccgttcccgcaggaggaagaactggccgaaaagtcggcgcgccttgcggaactgaacgcccagttggatgcagacgaaaagcacgagccggaacagggcgaggaagaaaaggcggatgaacctcgccgtccctcagtgctggcggctctggaagaaaagtcagataaggccgaacctgtcaaactgttcaaaagttatctggataaggatggtgatgcccgatgaatgaccgccgtgaccagcagcttcatttccgcgtcagtaagcaggaactggaacgcatctggagcaagatggaatccagcggtattttgagcatcggctcctatctgcgcaagatggcactggatggctactgtctgcatctcgatttgccagagctgcgccgcatggcccatcttctgcaaatgtgcagtaataacctgaaccagtatgccaaagctgccaatgaaagcggtcaggtctatgctgccgatttggaagatttgcgcattcggttggatgaactgattgccattagcaaacagattctctcctggctggctggtttctgatttttgccccacggcttcggctgtggggatacatattatataaggataaagccgtaggaggtggtggacatagccgcaacacgcttgattgcgctgcacaaaaacaaaggaaaatcggttgtggcctgcttgaaaagccgcacagactatgcacaaaacccggagaagaccgaacagggcgaactggtcagcagctacgagtgcagtcctctgacggtggacgaagaatttatgctgtccaagcggcagtatgaacttgccactgggcgcaggcagagaagtgatgtaatcgcctatcagattcggcagtcattcaaacccggtgaaatcaccgccgaggaagccaacaaggtaggctatgaactggcgatgcgttttaccaaaggcaagtacgcttttattgttgccactcacacagaccgggagcatattcacaatcacattatttacaactctaccgcactggacagcacccggaaattccgggattttttattgtccgggctggccgtgcagcggctgagcgacctgatttgcttagagcatcagctctccgtcattgagaaaaagccctaccgggagcggcaaaagcgcacactttacccacccaaggaaagcaatcgtgaccatctatgcagtgtgctcgacaacattctggcggaaaagcccaaaggctacgaagattttctgcaaaagctggagcaacagggctatgaggtcaagcgcggaaaatacacctctgtcaagggaaagcgacaaaaacgattcattcgttttaggacgctcggcacaggatacagcgaagaagaactgaaagcggtgattgccggagaagccgagcatcgcccacatcagaagcagccgccaaaagagaaaccgttcaatcttctggtggatgtgcaggcaaagctggccgagggcaagaacatcggctatgcacggtgggcaaaaaagtacaatctgaaagaaatgtccaagacactgattttcttgcaggagaagaaaatcggcagcatcgaggaaatgcaggagcgtgtggacgctgccactgcccgctatcacgaactgggcgattccatcaaggcagcagaaacgcgcatgaccgagattgccgtgctgcggacacacatcgtcaactacgcaaaaacacgcccggtgtacgatgcctaccgcaaggccggatacagcaagcgatttctggaaaaccatcgcgcagagatcacactgcacaaggcagcaaaaacggctttcgatgaagctaaactgaaaaagcttcccaaggtcaaggaactggatgcagaatattccaagctgctgacggaaaagaaagccgcctacccggactaccgcaaagcaaaagacgagatgcaggagcttcttcgtgcgcagcgcaatgtagaactgttcttcgcagaagaaaagaacaccaccgaaaaaacgcagtcccgatagacgatgacaacctaggattcttccattgtgggagagtcctaggctgtttttttgttatagaagtgtttggaacaaacgcgcagcctgcatcggcacgatgcagatcaaacggggtttgggcacagcccaacaagcattttgaatttggatttgaaaaatccgattcaaaaattgcaagttggtaccaacttgccctgcttgccagttttgtttgggcgctacccttacgggaagtgtctaccctaaaagtgcgttcttgttaagcccgctgtgaaatgctacccttaacatgaatacactgaaaggataaccaccatgaaagatatagaaatcgggcctattcgcccaccctctgaaagtaacagcctgctgattcgggtcacaaggggatgccattggaacaagtgctatttctgcgggctttataaatccatgcgcttctccatgcggcccattgatgaaaccatcgaagatattaagcggcaggcccagctcaaccggggaaaaaagattacttcctgtttcttgcaggatggggatgctctggtgctgaaaacagattatctgctccgtatcttggaagcgatcaatcagagctttcctgatatgcagtacatcacttcttatgcccgcgccgatagtatcactcgaaaaaggccggctgagttaaaggcgctccggcaagcgggcctaaaccatctttacagcggaatggaaaccggttcggatcgaatactgaaacttatcaacaaaggctttgacgtggataccgttgttaaaagcggctgcatggcaaaagaagcggacatgatcttgtcggagttcatattgttggggatcggcggcaaggagctgtctgaagaaaatgctgttcagacagcaaaggcgctgaacaccatccagcctaattttatccgtgtccatgccacaggcattaagccagagtccaagctgggcgagtttgtcagggacggctcttttactctgcaatcggaggaagaaatcgttgtagagcagaagctattcttgcagcaactacatgagatggacagttactatgtgaatgaacacatcatcaatttgcttttggaagtcagggggaatctgcggacagagaaacaggaaatgctttcaacgattgaccgtttcctggccctgccaacgaatgaaaaacttttgtttactgtcggcaggcggctcaatattttcttcctcttggatgatttgaaaaagccggagctgcaccaggaagcagagaaaaacctgcaacagattttaagtaagaatcccgatgttgactttgccgcactgtgcaattatgttcggcagtcgcagatttagagcagaaaatataagctgggcatagccgtttttcgtcagctatgcccagccttttatttgcgactttgacagcatggcggctgaacatccaggccgtccagatagttgtttccccactggcacattgcatccagaataggaacaatactctgtccaaatggggtaagagaatataccgtcttgggcggcttttctggaatcacttcacgatgaatcatgccgttgttttccagatcgtgaagctgctgcgaaagcatcttcggcgtggcgtttggaatcagccgctgtaactccatatagtgtaatggatggtcaatcagatgccagaggattaatggcttatacttgccgccgatcaaagacagggttgcctcaactgggcagttgaattgatttttttcacatttcataaaatggctctcctttcccgcaaggtgctatctttttgggaagtatcttccgaaaaagtgcattcttgcggttttgtgttctagtgctacaattaggtcaatggttgatttgatatgctcaaaataaaaatactgaaaggactatatattatggattttatcacgattgcaaagcagcgtatgtcggtacgcgattacaaggaaacgaaggtagaacctgagaagctggagcagattctggaggctgctcatgtggccccgaccgctgccaaccttcagccgattcgcctgattgccgttcagagcgaggaaggtcttgcgaagatcagtaaagcggccaatatctacggtgcgcccctggctattattgtttgcgccgatcacgataaggcgtgggtacggcctttcgatcagaagcagaccggcgacattgatgcctctatcctgaccgaccacatgatgctccaggccacggagctgggccttggaacggtatgggtatgctacttcaagcccgatgttctgcgcaaggaatttgacctcccggccaacctggagccggtcaacattctggttgtcggctattccgatgaaggaaccggcgaccccaatcgcttcaataagcagcgcatcccgatgagccagctggtttcctacgaaacgctgtaattgaatacccgcgcagcccctgcaaaacagcacaggggctgcgtttttatctttctgaaatatgagcgtaggtttcttcaagaatccaccggatatgttcgtcctgcaaggaataaatcacgtttttcccggccttgcgtgattgcactaaccggacaatccaaagcgcacgaagctggtgggatatggccgattctgtgacctccatcttttgtgccagttcgctgacgcaagaatctttctgcatcagataccaaagtatccgcatccgtgtgtaatcgcccatcgctttgtgaagctcggttaattgttccaattcgccagggcttggagcggaaaaagtttttttctctgtttcgttcatgtatttttctccaatctataatgaagctgtttgacagacaagaattatgtcagtatcatagtcacaggaaggagctgatttttatgccgcattacaatctaccccataaccacggacagaatattgaaaaagtcttaaataagatgccctctgcggaagggtttaaggatatatcatttttatttcagcagcttggcgatccgacccggctgcggattctgtggctgctgtgccattgtgaagaatgtgtatgcaatctcgcggcggctgtggatatgagcgcccctgctgtgtcacatcatctgcggatattaaaaaagagcgggatcatttcaagccgcagggacggaaaagaagtctattattcgctgtcggacacgccgcaggcaaagctcctgcatcatgccatagatgcgttgtttgaagtatcatgcccgactgaacaataaggaaatgcgccgcagcgtgtgaaagttgcggcgcatttctattgcgcttaaccctgatttgtgctgcccgctggcatatccggcagcttgacccgcatggcgcggatggcattgagaatcgcaataatggaaacgcctacatctgcgaacaccgccgcccacatatttgcatagcctagcgcacctaaaatcagaaccaggaatttcacgcccagggcaaacacaatattctgatttgcgatgcggatcgtcttacgggcgatcttcataacagcggcaattttggacggttcatccgtcataagaaccacgtcagcagcttcaatggccgcatcggaacccaagccgcccatagcaataccgacatcggcccgcgccagtacgggagcgtcattgataccatccccaacaaaggccaacatacctttttcgcttttctgcttcagcaggctttccacgcggtcaaccttatcagcgggcagcagttcagtataaacctgatccagatgaagctgccctgcgactttctttccaacggcatctgcatcgccggtcagcatgaccgttttgcggataccggcagatttcagcagcttgattgcggctggagcatcggccttgatctcgtcctcaatgatgatacatccagcgtatttcccgtcacaggccagatagaccacggtgccgacagctgaggatggcgtgtacttaatatgctccttctccatcagcttggtgtttcctgccagaatcgttttcccatcaatcacggcctgtacaccgtgaccggcaatttcctgaacatcggaaacccggctgttgtcgattttctctccataggcgttcttgatcgaaagagaaatcgggtggttggagtagtcctcagcgtatgcggccaactccaaaagctgcgcttcctccatgccgacagggtggatctcgctgaccgcaaaggagccttttgtcagtgtgccggtcttatcaaagaccacgacctcggtatttgccagggcctccagatagttgctgccctttaccagaacaccgatcttggatgcgccgccgatgcctccgaagaaactaagcggaatggagatgaccagcgcacaggggcaggaaatcaccaggaaggtcaaggcccggtaaatccaagtgctgaatggctgctgggtaatcagcggcggcaggatcgccagcgccagagcagcgaataccactaccggggtataatacctggcaaagcgcgtgatgaaattctcaatacggcccttcttatcgcttgcgttttctacaaggtcaaggattttggctacggtggattccccaaattcctttgtggtctggatgttcaggataccggtctggttgatacaaccgctgatgacctccattcccggctccacctcccggggcatggattctccggtcagggccgaagtgtccaaggtggaaaagcctttgagaatcgtaccgtccagcgggatgcgctctcccggtttcacaacaatggtttctccgatctgaacctcgtccgggtcaacctgaaccagttttccgtccctttcgatgttagcatagtccgggcgaatgtccatcaggcttgcgatagattttctggacttggacaccgcataggactggaaccattcgcccacctggtaaaacagcataacggcgacaccctcggaatgttcgcccaaaatgagtgcgccgatggtggcaatcgtcatcagaaaattttcgtcaaacacctgtccatgcaggatgttcgtgattgccttccagacaatatcccagccgacaaccacatagcagacgagaaagaccgccatctccgccaattcagggagatggagcaagctgcctgcaagaaacagcactgccgccacgataatgcgtgtgagcaagtgcctttgttttcgtgtcatagtgtattctcctttcgttgcagcataaagcgtgtcacgctttttctgtctattgatgaaaaacaccggctaccttgtggcagccggtgtccagcttttcattacgccttaacagtcacatccggctcgatctgcttaatcagcgtctttgcttcggccagaacagcgtcaaactgatcgtccggcgcttccagaaccatcttctgacccaggaagttgacggatacgctggtcacaccgtcgatcttcttcacggcgttctggattttgtcagcacaatggccgcagtccaggtcaagcagtttaatggtctttttcatggagaaagccccctttcatttttgtatttggttggtttgatatggtatgaacgattaaaagattgtttaattgttcatgctgccagtatattcacgaaaaccctcaaagtcaatggatttgggagcggttctgccctttggattggaaaatctgccgatttgatttccagcaaaaaacctcatttctctttggataaaaaaagctccactttggagcggacaaaggagaagcaggataagtataatgaaaaacggtcaaagaccttgtgcgtaaactttatgttcggggctttagcatctttcccccaagatgccaaacgccccttttcataacggtatttagttccctacgggggaggggtactcgcacaaatctttataagaaagaagtgatgattttgcaaaaggagcaatttgacattacgggtatgacttgctcggcctgctctaccagagtggaaaagagcgtggcaaagctacctggcatcaaagaagtatccgtcaatctgttaaaaaacagcatggttacttcttatgatgaatccgttttggatacggcgggaatcgtccaggccgttgaaaaggccggctatggcgcgattcccaaagcctccgcacaaaacaagagccggacgaccacaccggcagcaaaaccggaggtcagtacggcgcaggtagaatacaagcagatgaaacagcggctgctgctttctgccctttttacgatcccactgttttatatttctatgggtcacatgatggggtggccgctccccagctccttgctggggatggaaaatgcaatcagctttgcatttacccaattcctgctgctgatcccggtggtgttcatcaacttcaaatattaccggatgggcttcaagaccctgttccacggctcgcctaacatggattcgctgattgcgataggctccagcgccgcaatcgtttatggcatttacgccatttacaaaatcggcatcggattcggtcatggggatatggctacggttcacagctttatgatggatttgtattttgaatccgcaggcatgattctgacccttatcaccttgggcaaaaccctggaggcccgcgcaaagggtaagacttcggatgcaattacaaagctgatgaatctggctcccaaaacagctaccgtggagcgggatggaaaagagcttcaggtgcctgtggaagaagtgcagttgggcgaaaccctgattgtcaaggccggtgagtctgtgccggtggatggtattgtcatcgagggcttttcctccgttgatgaatctgccctgaccggcgagagcatccccgtggagaagcatatcggggacaaagtgatcggcgcgaccacaagtaagtccggctatttcaagatgcaggccaccaaggtgggcgatgataccacgctggcacagatcgtccggctggtggatgaagcgaccagctccaaggcccctattgcgaaactggctgataaggtcagcggcgtgtttgttccggtggttatcagcatcgcgctgattgcagtcattgtctggctgctgttgggatatggctttgaatttgccctatctatcggcatttctgtcctggtcatttcctgtccctgtgcgctgggccttgctacgcctacggccattatggtcggaaccggcaagggcgcaagcaacggtatcctgattaaatcggcggaggccctggaaacggcccataacattgatacggttgtgctggataaaaccggcacgattacccagggtacgcccgtggtgacaaatatgctctgcaaagagggtgttccacaaaaggagatgctgcaaatcgctgcttcgctggaaaagctgtccgagcatccgctggcggacgcgattgtggcagaggccgaaaaagcacaactttccttcctcccggtggatgatttcaagcagattcccggtcagggccttgtgggtcagatcggaaacgaaacgtgccttgccggaaaccgccgactgatggcggcaaatggcatcaatggcggcgcactccttcagttgggcgaggaaatggccgttgacgggaaaacacctctgttctttgcccgtggcggtcagcttattggtgtcattgccgtggcggatgtagttaagcccaccagcaagcaggccatagcggaattgaccggcatgggcattgaggtggtcatgctgaccggcgacaatgcaaagaccgcagaagcgattcggcgtcaggtcggcgtggatcgtgtcgtggcagaggtattcccccaggataaggagaaggaaatccgccgtttgcagagcgtcggtaagaaggtggcgatggtcggtgacggtatcaacgatgctccggcccttgccagagcggatgttggtatcgctatcggggccggaacggatgtggcgattgagtcagcggacattgttttgatgaaaagcgatctgctggatgtgtccacggcaatccagcttagtaaggcggttatccgcaacatcaagcaaaatctgttctgggcgtttatctacaacatcatcggtattccggtggcggcaggcgtattctatcttccctttgcatggaagctgaaccccatgatcggcgcttttgctatgagtttcagttcggtattcgtggtgtccaatgccctgcgtctgcggtggttcaaggcgaagcatcaggccaatacagaacgggattcagtccctatgcatgaacaaacaacgattaaacaagaacgaaaaggagcaattcacatggaaaaagtattgaacatcgaaggaatggtttgcggaatgtgtgtaaaacacgttgataaggcgctgcgggacatccagggcatcaaggatgtggatgtttccctggagagtaagtcggcccaggtgcagcttgaccaggatgtgccggatgctgtgctgaaagctgctatcgaggacgctggctatcagctcgttagtatccagtaacgggccgtttatgaaggccaagaaaggcgatattgttcacaagctaaaaatcgccagaggacagttagacggtatcctgcaaatggttgaggaaaatcgctattgcgtggatatttccaatcagcttcttgctacgcaggcgttattaaaaagcgccaatcagcagattttgcaagcccatatacgaagctgcgtccgggatgccctgcaaacggacgctgtaaatccaaaactggaagaagccctgaaattactggaaaaaatgatacagtaacaacgggagcgggaagggccttatgtcctttccgctcctaaattcgtttcagattggattgtaaatcctgcggttgggagcgtacaaagaagcccggtttttatatactttaagtggttagttagatatggttaatccagtgaggcgcgtcactggcgcgttttactggataccttgtaattaaaatagaccaggaggaatagagtgatgaaacaggcacttgacacaagaacaaagctcttaacaaaaaatccctggccgctgatgattgaacttagcatccctgcggttcttggcatggtggtcgttgggctttataacatgatggattccatctttgtcggccagatggttggtgacgtgcagatgggagccatatcggtatcctatcctttaacccttatcaatgccggttcagcggcaatgctgggcgtgggttctgcatcggtactgtcccgcgctatcggtaagaaggacgagaacacaattaagaagatcatgggcaacttggttgcgatggttcttctgttgtccgtcatctacactgttgtgggtatggttttcacccgccagcttctgtccctgaccggagccagcgataacattctgaattacgctgagaaatatctgcggatcgtattcgccggttctctgttcgtaaacttcttccagagcgccaacatggtcatccgtggagaaggccagctcaaaagggcaatgaccattattgccagtggcgctattttgaacattatccttgaccccatttttatcagcatcctcaacccctacggcatgggcattgaagcggctgcttatgcaacgattttctcccagtttgtccaggctgcgattaccctgtggtatttcaagaagaaaagcccccatgtgaagatcgggcgtatccgcattgatggtgagctgcttccccaggttctttctgtcggcatctctgctctgttaatgcagattctgaccctggtgcagcagacagtgatttatcgtgtggcatcgaactatggcggtgaaacctcccagctccttttagcggcggcgctccggttctggaatttctcttttgtacctctatggggtatcagccagggattccagcctgccgccggtacaaactacggtgcgaaagactatgaccgggtaaagacgctgaccagagttttcattatcgccgcaacgctgctgtcgctggtgttctatatccccgccgagctgttcccggaaaagattttgtccatgttcctgacaacgccgggtattgccgcatcaggtgcgacaaacttccgtatcatgttcagcacctatatcctgcaaggcagttttatgatcgccgtgaccctgttccagtctttgggtaaagcgaaaaaggccacctggcttgtgctgttccgtcagatcattctttttatcccgctctgcgtggttctgccgatgatcggcggcatgggtattcgcggcgtgtggctggcgattgcgctgaccgatgcgattctggttgctattatcgcgttcatggtggcttatgagttccgcaaactgcctgcgacttcttccgtgaatcggtaaggaggatcgcttatgacgcttaaaaagttttttggttcagcgaccattatttcaataatcggcgttgcactttggatatgcaaaaaattgaaaacttgccgtcaatgatctgtgcggaataaagacattgcagcaaatcaccccaacataaggccggtgcttttccatttggagagcatcggctttttctccgtttgcacagttgtcaggaatgtaatataatctaatttgacttctgattggattgcaaatcctgccgattggagcgacataaaatgaggaaagactatataataaaagatgccaggagaatcctggcagaacaaataagagataacggaaggaatactatgaacgaaaaccctattaccaacgctacggggttgtctgcggttattccaaaagataatgatggatactgtaccgtctataaattggactgtgcggatggcctgggccttatgacagtctatcaggtctaccctgggattcagcttatttacaatgatttcgaggcaacgagctgttattgggacggaaatattggcaagaacgtcctggagatcaatcattgccgggagggacgagaagggagcgtattgcaaagcggctcctgcctgtatctcggagaaggcgatctctccattcatacaatggataactgtgcgtctgaaatgtctttcccgttgaaacattaccgtgggatctcggtggtgcttgacctggaactggtttctgaaaatccgccgggaatcctcacggaaagcggtattgatattgcagatttcaaaaacaaattctgtgccgatggctcatgttttgtcatgcgggcaaaagacgatattgaacatatcttttctgaactttattccgtaccggatcgctttcaaaagccatacttcatgctgaaggtgcaggagctgctcttgtttttgtgcatggtgaatgtaaagcaggaaaagcagcgggagttatatacttctccccaggtggagattgtgcgccaaattcataagcggctgatctctaatttgcatgagcggctgacgattgaggagctttccaaagaatatcatatcaatacagccacgctaaaagatacattcaagggggtctatggtcagcccattggaacctatatgaaaacttatcgcatgaaacaggctgctgctctgcttcgccagacacaggaaaccatcgctgaaattgccaatcaggtcggatacgaaaatcagagtaagtttgcaacggcttttcgggatgtctttaagattgcaccggctgaataccggaaacagaatagtggcgactgattgcccaagaagaaatgcttatacctattgccataggttaaaataaaaccagcagaaacaagttccttcttgtcctgctggtttattcataatcttgcggatcagaggctttgtagtgccggctgataaactgctctgccatacaatccagcgtttttatggcggaaaacaatattccctacaaggtgcgggcggcactgcttctggtgccgccgaatacaccaatgcctaccggagcagtgactcaatccttgtggtacattgcagttcgttccggggacgtccaccgggtgcagcactatcttcgcacagaaagggatacctaagatggagcagttatcggcacgtctgctgttaacggctggcatcctgctgctgatcgcagaagtgatttttgccattctccaagtatggctctatgccgaccttctctgggcgggtgcgtttggatgcctgatggcggctctgaactttcgggattccaaaaacgacggcggctaaagcacacggcatcgtagtgcacggtcaatgcggaaatgcgagctacacccgattttccatatcgagtgatatagatttggctttgggggaggattgtctattgtatgcaaaaaattgaagttgttgttcgcatcacgaaggatcactgcccaccgcaagagcagacgatttttgaatggttcgatttgatgcggaatcccacagacgctctgagccgtcccgatctggaaatcaacttggaacaccaccgtgttttcaaacacggaacagaggtgtacatgagtcgttatgaatacggtgttttgagtttgatggcacagcatccgggcaaactgtttacaaaggagcagatctttgaagcagtctggcataaggacagcgaaagctatttgagagccgtcaccagcacgatcggtcgaatccgccagaaaatagaggatgacaaagatcacccccgttatattaaaacggtttccaacattggatatcaatttgtcccatcatcggaatcggtgcgattgaatcgcaatctgtaataaaagccataccgtgagatcctagtaggattcttcggtatggctttatcgttttctacgctgtacgaaatcggcatccttgcatagatgaccaagaatattctaaaatagagataacttaattcaggaggtcaaaccatgcaaacatttgaagaagtattgacccacttccatagctttttagagtctgcgacctatttggacgttgttccatgccgctggggatatgtaaggctttttaatgaaggcaatcccatcaatttcaatgcaattctttgccgtacaccacaagaactatatacggcattggaaaatgatttggaaacagagattcaggtcagcttgggaatcgactgaattggtataaaattggtttgcttttgggttcgttttggtatagtgactttgaaaaatatgctatactgtaccacaagcaaaacattttcagggattttcaatcttactgtaaaactctgtcagatgctttgccagtgtgcgggtcgagtccattaaggtctctcgcaccgcttctggacaggaaagatagattcgattgaactcttttaactctatttccgttttacccatccccggagtaatcagcgcatcaagcgaaaccggcaaaacacgagcaatcgccaaaagaatttcataagatggattcatgctgcctttttcaatgttggcgatatgcttcgttgaaacatggcagcgttcagcaagttgttcttgtgttaaacctgccagcttgcgctccttgcgaaccttttctccaagtactttcaagtcagaattcggcatcatcgttcacctcaatagtattgtatcgttctggtgaatgacgcggtataaccttgtatttcctgtgaataggaagtatagtgccgatttttacatttcccggtcgagttataaaaaaacggtaactcgtctgggtgattctacgcgccatctgatcacagttgccgtttgtggaggtaactgtgattttttattggggtaacgcatcaaaaaaagcctgtctgctgccgtaagccagaccgccctgaagcaagcacaatcgttccgttccaccatccacaatcgtgccgatgtgttatattgcgccagcttcccgccatgggaggctggcgtttttgcgcttttggagccaaaatgccgcagtccaccgtttctcctatgatatagcagcaaactttatatttgggagggaaagtcatgctcgatcataagaagaaagcaattacggaacactggcagttttgccccaagtgcaacttaaaactttatcgaatgaccgccgactgcactggattcatccatataaaatgctggcgttgccggaaaatgttatggctcgacctttccattcgggccaagtaaacatcagttttataaaacgatcgggtgcactgcactctgaatatggactgttagcaccgagcaacgggccattgccataaggcaatgtatgaaacgtagcaccaaatggccgggcagcagcttgactgaaagattttcgcttgaaaatccttcggttggctgttgtccggctattttttatagcttcagatggcctgctcccgaaaaggagcaggttttatgtttgccctcttttcatggctaccccaagcggcgaaatatccgtagcatctccgaattttcggcttttcacgttttatcgaaaatttggaggttacacatgagtttcaataatggcaatgaacgtcgcaagctgaacgcaaagtgggagcatcttcgtgtgcagtaccgcgaagcaggaatgagcgaagatgcaattcaggctatgtacgagtttgatttgggtgttcttaatagcgaacgtgcctacatcactaacacaatgacggtttctggtgctgccgatgattgcgcagccaaggaaaccagcgacttcaagcagtatgaaaaagcccttaccgtaacggatacctaccacgaaaccaaaagccgttttgcatggattggtgagattgagaacgaacagttgcttactgcactcgaaactttgaaagtcgaagatttggaaatcatcaccatgtacgcttacgagggatacgacatcactgaaatatctaaagtctacggcgtatcccgccccactattagcataaaaatcaagagaattactaaatttttgaaaaacttcaattttaatgctacgaattgacccttctcgatggctcgtaagtgtaagggcaattcaccagatggcgaaagccactgagcgaaatgtctgcactcatgttctttgaaaactgaatagttccgtcatctggtactccgataatgatacttccgtaattcgcggcccggtcacaaagcagacggggtggctgaaatgccaatgaagcggtacaagtccgctgccagatgtttatgccccactcgcagggagccgagggcgaatatgcgagaccttaacttattaaatcaggcgtggccgaatgctgttttcggtcttcgtccacgcctgttctttttacttattccatatatctgcattttcgtcctacataggaggttttatgaacgagaacgaccgtaccaccttagagcaagcgatctacgaggaaatggaactgaccccggaaatgatccggtccatccgcacgctctgcggtgtatgcctttgtagttttgtagaatccaaggcgttcaaaatcgccattgttcccagcgcagaccgcagcatggacacttgcacagtctgccagacccggcgcggtcatgactacgttgtgatgaagcgctgaacaaacacaccgcccactgccaaggaggtgcagcgggcggtgtacatattgaaaaaggagggcagcttttgattcaaaactggaaattccagcgcggagacattttcttcacccgtttcgacaacgccatcggttcagagcaaagcgggaatcgtccggcagtcgttctccagaacgatgtgggaaatttttactcgcctacgctgatcgtagccacattgacaagcaaggcggcaaaaaagtatacccagccgacacactgcctgctagtgaacgattttctctccgttccgtccatcgttcaggcagagcagatttttaccatagacaaaagcagggtgctgaaattcctcggacacctcaccccggaagaaatgagccgggtggatgatgctgtccgtgccagtcttgccctgaacccgatggggagcattcagcggcttccacccatcatccgctctacggcggcttacgcgccgcctgaggtggttgacggtaagccgcccctctatccctacacgcccatcaaatcatcctttgaggatgctgggagtgtcgaggacatgatgctgtacaccgaactggaagctgcggtacacgcaatgatccagcggctggaatacagcttcacattcaacccaagtctgctcaccatcccgaagcgtaagcagcaggttgctgaaatcctgaaagaagccgaaacgtacatctggagaatcaaggaggaaatgcgatgcgcctgaaagacaacaccaatcccttcatccatgtcaacccgccgtaccagctcatggtcatccacagcagcaagctggtctacccccgcgaactgtatcagcgcggtgtggagcgcaagcgtgtggaactgattgccgcccacttcaacgaatatgtggcaaatgagccgaaggtcagtttccgcaacggtcagttcatcgtaacggatgggcagcacaccatcgaggggcgcatcctccgcaacggcggcaaggatctgccgattctctgcaaggtgtacacgggcatgaccgtggagcaggaagccctgctctttgccgaacagaacggcttttccgctccgctgactgctggcatcaagctccgcgccaaggtcgtaggcggcgatgctatttccaaggctttcctcgcagccaccaaccgggtggggttgagtctcaattatgacagccagcagctgaccgattaccgcatcggctgcgttggtacggctttccgactctacaagcagatgggcgaaccgctctactgtgaaacgatgcggctgatcgtggcagcatgggagggcaagcccgattcgttccgggcatctgttctgaaaggcatgatgcactttgtggagctgtaccacggcgagttcagtgaagaacggctgctccgtgcactgcgcaacatccacccggtcgatatttaccgcatcgggcaggacgaccccgcaaagctgcgcggatggaagaaatatgtttttcccatttacaccgcctacaacggcaagtgcagaaaagacgcgctgccgatgaaattctgacattcacaggcattcctcgtataataaaatagtagtatttatagaccgctctccagcggaatgctacaatagtttcagggtgctgtggattggtgccaattcccgtacaggtgggggcttttgctgcgtgatgcctcagatcatgctgtgcaggcagctccgcataggtggtatagtcgcagcgggagcaggtttcgtaagcatcccagccgggttccgtacaggtaggagcttttgctgcgtgctgctccagagcatggttcagtgcgggcagctctttgcgggtggtataatcgcagcgggagcaggtgtcgtaagcatcccagcccttttccgtgcaggtgggggcttttgcttcgtggtgctctaaatcatgttttagcgcggggattgctcgaaaagtggtatagtagcagcggggacaggtgtcgaaagcgtcccagccgggtttcgtacaggtgggggcttgcgcatcataatgcaccagagcatgattatttaggtttcttttgccgtatttcccaccacacgcctcacagaccgctttggtggtgcaggttgctgtgccaccggtacagcttgcggtaccatttaagccgcagcgcaagcaaatgatgcggtgcgtgccgttgccaagggaggcgttcgccggagttttccatttgtgaccgagaatgccgtattccgcgccgcatttttcacaggttttgcctgtggtgcaggtgggcgtttcggtgccgccggtatggtccgaaagatctccataaacaatgctgttcttcctgccgcagactgagcattttatatggatcctatgcttggttgaatcaacttttgtatatccgaggatctcatagtttctttgttgcatacagacgaagcagtacgtatagatagaatctgccgctttaacgtttaacacgatccccggtatcaggcacaccattgccagcaccgtcaaacaccggatcagccattttttcatgttgctccctccttatcatcaaaccttgttatcctttcagatcaaactgcacggacagcgatgcaagcacggcatctaccaccttccgcgcctcggcaagcatatcgatctccgccacaaaagcaatgacctgctcgcgctcctgcgcggggacctgcagcgcactcaggctcatgctcagatagcgccgtattttgcgctccagcgtaaagtaggggtcgcaccgccgtgccatgtagccgcgcatcatgccagccgtgcccagctccatctcgtagaaatcacactcggcgcacccgggcagatacgcgctgaacgccgcctgcagctcggccgtggtgctgcggtggatgatctccgccgtggcggggaaggtgtacgcttccacatagatatcccgcaggttctcgctcagctcggtcatcgccagctgcaaagccgtttccaccgcgtagaggtacaccggcgagggggcgtttgccgccagcggccttaccgcgccgaactgcctgctgaacatcataccgatcagctcggtcagcacaccgtccttggtgcggaaaatattctggaacgacccggcagaaacatctgcttcctttaaaatttctgcaaccttggtgttcgtgtagcctttttccagaaaaagccggacacaggcggtcagtatccgccgttttgcttctttgctgtcgtatctgcgcgccattgggaatcatccttttctatgattggtttctgacccaattatatattgatttgaaaattgtgtcaagtaaacttttaagggcgtattttgggcagtttgacgagggagagctttctgcgggtgcgcatccgggcaaaacaaagcgcaatggacattgctgttatccgctgccgcagccagacagttcgcggcagcaaaaaagaggccaccgatcggggtgacctcttttcagcgtattttcagcgtaaatcccgcagcaggcgaacccaccatctccatgacggctcttttggagttgctctttgcgtaagattgcaaaataaatcttatttctgacagaaagagccgaacccgtgcaacgagtccggccctttctgtgctttggttggatcttaagcaaagttatggtaaatgaagaagttggctttgggagtttacagcaggctcagtgcttcctcgtctgccacaaggatgcagtccggatgcagctgcaggatgctgccggggcaggcaggggtcacagggccggtcacggcgtccttgacggcctgtgccttggctttaccgttggctaccaccagcaccttgcgtgcctgcatgatggtcttgatgcccatggtgtatgcctgtttggggacaaggttctcgttgccgtcaaagaagcgcttgttggcttcgatggtagtgggcgcaaggtcgatgcagtgggtctccagctcaaaggcttcgcccggctcattgaagccgatatgaccattggggccgatgcccagcagctgcaggtcgatgccgcccagcttgtggatgataccgttgtaacgggcacactcggcggcggtgtccagattggtgccgtccggcaggttggtcttggccgggtcgatattcaccttgctgaacaggttctcgttcatgaaataccagtagctctgggggtgctccttgggcaggccgcggtactcgtccagattgacagtagtgacctcggagaaatccaaatcgcctttgttgtaccagtccaccagttgggcataagtgcccaccggggtgccgccggtggcaagacccagtacacagtccggcttcatgatgacctgtgcggagatgatgttggccgctttgcgggacatatcctgataatcttttgcgcggatgatcttcataataatactccttttatagtaccgttacgcctgcgtttcggcaggcctgtaaaaattctacgggcagctttccgtccgagatcacaatatcaatatcggacagctcgcagatgtggaatgtgcttttcagtccgatcttggaggaatccagcagcacggctttctgctcacagcggcggagcacggtctgcttgagccgtgcttcatcctccacgccgcaggtaaaaccggtttccgggctgtaactggtcacgcccagcagcagcagatcaaagttgatgccctccatcgtctggatgctctgtgcaccgcagacgctcaggctgaaccggttcaggctgccgcccggcagggacacatggggcttttccagctttgccagctccatggcgcagctcaggccgctggtgtagatgagcatgggctgatccgggatgcaccgggccactgctgtggcggtgctgccggaatccagaaacagggtggtgttggggcgcagcagagcagcggctttttcggcaatgatctgctttgcttcggcattgcgggcggaacggcggctcagcaggtcgtctgtgcctaccacctgctccaccgacttgacaccgccatgcacccgcaccacacggcgggcttcatccagtgctttcaggtcggtgcgcagggtcatttccgaaacggaagggaaagcttccttgagctgggcaaagctaatgctgcctttgcggttcaccagctccacgatttgattgcggcgttgttccatgggggattcctcctgtctgcgtttgtcctgtcccatggcacgttctgcttagtcctccgggttgaagtttgccagcagatattcctctgcttccgggcaccacaggccgttgtgggcatccacgatgtcagccagtgcggtatagcgggggtcgttgtcctgttcgcccttggcacgcagatcggtcagggcgatgaggggcatggtcaggtgggtatagatcagctttttgccgccggggatcttgggcaggttgagggtggtctcggcagcggcgttcagaccgccgatgtgggtgaccatcacagccgggtcgatgcgcttagcggcggtcagttccagcgactcgatcatgtcggcggtattaccgccggtggtgcccatgacatgggtagaattgtagtgcacatcgtagaagttcatcttggcgctgaactgcttgtcggtggggcctgcaaagaagttcaggcagccgtcacgacccagcacagcactggacagctccaccaccggcgcgatgggggcgtagcagaacacatcatcaaagccggtaccgccggtcagctcccgcagctcggcagcggggtctgccatgttggcggtgttgacgaagtacaggtcgatgccgtccttctccttgacctccttcggggggaagagggactccgcacgggccagacgatcctcgttgatatcggtgaccaccaccatgccggggcgcacatcacggtgcagtgcgtaggtcagagcacccagacccatggggcctgcaccggccagaatcgccagctttccacccttcttgatgcccatatcgtgatggtacacacccatcttggtgtggtaggcggcgttgaaagcaccgatggagcagctcataggctcggccagagaagcctcgtagtaagcacggcccttgtactccagcaggcagcccagttccatgacctcggcagggatgatgcagtaggtggcatcgccgccgaagaactcgtaggagtagccggggctccacatggtgcccttgtagttcagggcgggctgcagggtgaacttcatgccgggcttgaacttgtcctgatgcgccttgcccaccttgacgatatcaccggcgaactcgtgacccatgatggcggggtgctcggctacatccggatgcacacgcttgtgaccagtgccgaggatggcgcacttgtaagtagacatgcagatgctatcggaaacgaccttgaccaagatctcatcgtccttgatctccggcagttcaaaagtatccagacgcagatcgttggcggcgtgcagacgaacagctttgactttcataatgaaactctccttttattataacagttaccgttgtgttttcaagaagttttacagatgttggaaggtgaccagcggcagcagttcttcgatctggctgcgctctgcagcctgtgtgccgctgcacatcacattggcggctcccgtggcgatggacaggcgaacggtgttttcttcgctgagcccttccgcttcggcgtaggcgagagcggcgaccacgctgtcgccggcacccaccgtgctgcccactttgaccttcagcgccggagcgtagatcacgctgtccttgcggagatacagcgcaccccgaccgcccatggacaccaccacatgttcgatgcccctgcggatgagcgcctgaccggcatcggccagttcatccagcgttttcagctcccggcccatcatgcgggaaagctcgtcgttgttgggtttgaccagatagggagcagccttcagcccctctgccagcagctcgccgtctgcatccagaaagacctttgcccctgcctttttgcaggattccacccatgtgtagtaggtgtccttgggggcacccttcggcaggctgcctgccagcaccacgatatccccctgtttcagttccttcagcaggtcgtacagcagagcggtcagctccggggcatccacctcgatgcccggctcgttgatgtcggtgttggtgtggttttccgggtcgatgaccttcaggttcgtgcgggtctcgccgggcacgaaacggaagttgtgggcaagcccttcactgtccagtgcgtcctgaatggctttgccgctgttaccggccagaatgccgatagccttgctggtcccacccagctttgcgatcaccttgctgacgttgatgcccttgccaccgggatcggtacgcatcttggtgatccggtttacggtgtccagcgcaaggttcgggatctcaacggtcttgtccagcgccggattcaatgttacggtgtagatcatgggaacaacagcctccttcatgattgttgttatgaaactcgaaactgttgaaacgaaagctctggcattataataccaacagttctcgcccatgtcaagctgttgtttcaacaaattgcactgtgtgtttttggtgcttttcgccaactttctgggatacatgatttttagttcaaaagttctctaataggtatcttgttataataacaaaaaactcccggctctgcccaaaaaggcaaaagccgggagtgcgttttcagttcattttgtgtgcggcggtttgcagtccgcaaaaaagccacggtcaaagccctgttccagcaggtctgcagcttcctgctgctggccggtgcgcagtgcttccatcagccggggcgtttcgatcagctgcccgctgacattctgcatgacctccaccgggacgccgttcccgttgtccggagccagcagcaccagtgcccccagcacgatgcgccccggctcatagaccggcggctgtgcctgcagatagcccaagcggcagtcctttaccgcacttgtcctgcaatggagcagcagggcatacaggggtttgatgtaggtatcgccctgcgtttcacggcggcgaagctgctgctccaccagccgggcgtccgcttcctgcgggcagaacagctgcgccgctgcatggatgagggcagcgcggctgccgggagccttgacgggctggatggtcagatgttccagcagcccggtcatggaccgggtcaggcgcgcataatactgcagcttggagcctgcgtgcggtgcatcctgcacaggctgcaccgccggttccggttctgcgcggttctggctgtaccgcgtgatagcgtccttcagcacggcacgatccggttccagcagggaagggctgatgcacaccgccgggtaatccagttccagcggcacggtggagataatgaagtcgatttttctccggcacaggtcggcagtgttcagctcccgcaccgagcagcacccctccacctgcaaagagggaaactcgtttcccagccgggaagccagaaagcggctggagcccatgcccagcggacaggccactaccacccgaagccgcagccggaacatggcattctgttccagcactgcgccaaagtgcatggcaaggtaggccgcttcgtcgtccgagatggcgggcaagacgaattgctgctgcaccgcatcacaggcggtgcgggtggctttccacaggccggggtaggcggtgcggatggtgtccagctgggggttttcggtacgaatgttctgctccacccgcagcagcatggggcgcaggtggcagtacaggtcatcccgcagggaggtgtaaccggaaaggtctgtgtgcagcgccttttccatttcccggataagggcggcttccagattccgcaactccatctcctgtgcgctaccccaagggtcctctgcgcccagataggcggagagatacagttccagatactgcgcttcctcaggcggcagggtcagcccgaaggcgcggttcagcgccgccaccagccgggcagcatgattgcccgccgggcgcagccctctgggggcactgcccttgtcgccgccctgccgcagctgctgaatggtcagggtgcaatggatagccagcgccagaaagcctgcatccggcagatggagctgctcttcctgttcaaactgctgcaaagccgcccagaccttttcggccgtttttgtatccagcagggtcgagaagatctcgttttccggcatccgtccgcagagcacctctgccaattccttttccggcatactgctgcgcagcagggcagacaccaccctccggtaggaagaagcatccccctgcagccagacccccacgccggggcggcggaacatctccacccggtaggggtgtagcttggtctcaagttcatccaagtccgcagacagcgtgctttccgaaacgccaagcgcccgtgccagtaccgctgttttgcagggctcctgctcgctgagcagccttgtcaaaagctgctgccgccgctctgcgcgggaaagttctttcctgtcgccgctgttcagctgggtgcgcagtgcgtctcgccgctccggcgcttcatccagcagcagacccttgccgggatttcgcacaaaatgcgccccggcagcctgcatccactgctccacagcgggcagctcccgcagcacggtgcggcggctgaccccgatgctttcagccagcgccgccgccgtcacccagccctgcggaaggctgagcagctgctcgatcagcttccgtgcatttgccgacagttcctcacgatacaccgcacccatgttgcttctctccttttcccaaaagttacccattgcttctattgtagcatagtgccaccccgtctgccagcccccaacgcagaaaagaagttgtgtgttttttgtcaccattgcccggtgacaaaagcttccttgttcccgtcttgtatcccggcgcatcagcaaatatgcacaaatcacccgcgcatccattggaaatgttgccgtatcagcccactggtgtcaccatcctccggtgacaaccccaccgcttgtcaccattgaaattcggcgcagtatcggctagaatagtgccagaacgaaacgaaagctcctccgaacagccgtccgcaggccgcagctcccatgccacaggagctgcgccgcctgcctttcaagtgaaaaaggagagctacaaatgaaaaacgctgtttcccgctttggcaagttcctcagcggcatggtcatgccgaatatcggcgcattcatcgcgtggggcttcctcactgctctgttcattgaagcgggctggttccccaacgaaaagctggccagcatggtctccccgatgctgacctacctgctgcccatcctcattgcagggcagggcggcaagatgattgcaggcgaccgtggccgcgtcatcgccgccatcgccgtggtgggctgcatctgcggctcggactacaccatgctgatgggcgccatggtcatgggtcctctggccggctgggtcatcaagcagttcgataagaaggtggaaggccatatccccgccggtttcgagatgctggtcaacaacttctccatcggcattctgggtatgctgctggccatccttggctactacgtcatcggcccgttcatgactgccatcctcaccgtgctgaccgccggtgtggacttccttgtggcgcacagcctgctgccgctggtgtccatcttcattgagcctgcaaaggtattgttcctgaacaacgccatcaaccacggcatcttcagccccatcggtgcaagtcaggctgctgagaccggtcgttccatcatgtatatgctggaagccaaccccggtcccggtcttggtgtcctgctggcctactgcttcttctgcaaggacgacaccacccgccagtccgctcccggagctgtgatcatccacctgctgggcggcatccacgagatctacttcccctacatcctgatgaaccccgtgatcatcatcgcccccatcgtgggtaacttctgtgccatcctgttctactctatgaccggtgcaggtctgtccggtcctgcttctcccggttccatcatcgcctacatggcaatggctccccgggattccattctcaccgttctgctgggcgttgtcatcgccggtgcagtctcctttatcctgtcctcggtcattctgaaagcgacctccggtcacaccaagagcctgaccgatgcccagaacgaaatgaaggagatgaaggcacaggctaagggcgagattcctgagcctactgccgtaaatgtcggtcagatccgcaagatcgtctttgcctgcgatgccggtatgggttccagcgccatgggtgctaccaagttccacaaccgcattaaggcggagcgccccgacttgaccgtgaccaactccagcgtggataccatccccgctgacgcggacgtagtggtctgccagcgcgttctggctgaccgcgccgccaagtgcgccccgcaggcacagctcatcacgctggacaacttccttgcagacccgcatctggacgcattgtacaatgcactgacctccacttccccggcactggatgccaaggccgaagctgccgccaacgaggagatcgtatccgatctgcgcaatgcagccgtagcccctctggcggctgccgtgaccgaggcttccaaagccaacggttccgtgatgaagatccaggcggaggacatccagttggggctgccttccgtcaccaaggaggaggccatccgtgccgccggtgcgctgctggcaaagcgcggctatgtggacgagacctacgccgacgccatggtggagcgcgaaaagctggtgagcacctacatgggcatgggcgtagccattccccacggcaccagccagaagaagggcaccgttaaaaagtccggcgttgtcctgctgcaatatccgcagggcgtggacttcggcgatgaaaaagcctacctcgtgttcggcattgccggtgtcggcaacgaccatcttgacttgctgggcaatgtctgcgagatccttgaagacgaggatgcgctggaacagctcaagaccacttccgatatgaactatgtgctggagcacttacaataacgattccaaaaaggagagattttttatgaagagcatcgatatcaccattcaggacaaagaaggtctgcacgcccgtcccgccggtatcctgagcaaagctgccaaaggctttgagagcaaagtcactatgactaagaacggcaaagtcgccgacatgaagaagatctttgccgtaatgggtctggccgtgaagtgcggcgagaccgtgaccatcgccgccgatggcccggacgaggatgccgccatcgaagaattgaccaagctgtgcaaggacgcatgacttctccctccgtctatgaccgttctgcataaatactactgacgcaaaaccgctccgggcagaacgctcggagcggttttactgtcagtatgcgtttttcatcaccgtgttttccagaaagctgaaaaacacatcgtattcatttggggtcagcattttgggagaacgcatgatcacaagatcatgcccgtggtttcccacatgatagggtggatgagtgtgagaatagggattttccaaaaccctcttgacgaattccacatacagtagtatttttcttgtaaatcccactgctcttgtggattggtttgaagccatccacaaaatgtggtcgtgttcattttgaacacagccacagaaagtgcttggttatcaccgtgagacccaccacttccgtgaggaaaagtccacgaaagaacttaccttcccgcaacacacccgattcattttgccgcttacttcacccgacaaaatccatcgctgcgctgcgtgggcggtatttttcttttatggtcacttgtcggggcggaggcccctccatcttgctaacgcaagaccgttcggtcgctcaaaagccccactggggctttcattgctgcgcaaccgcggcattttgctttccgaagaaacaaaaaatccgaacccttctcctatcgagaaaaggttcggattttcattatttggtgcgatggaagggactcgaacccccggcctactgattcgtaggaaccgaatggcacattttgtccatttcatcatttgacgttaaaacgtcattttaatcgaatcaccgttattttgccgttgttattctgttgcatcctttgcattgcttgcacgcctttgcacctgttatccatccttgcgatgtgcagaaaatgtgcaaaagtgtgcagagctaaaatcagcccgacaagatggtctcaaaatgagcgactttcctgctggatttttgaggcatcagcagcacaaaaattcccagttttatccaaacaacaatcttacatgacacatcggttctatggcagggtttaggacatccgaacagacaccgtttgatatagaaatgaggttcaccatgaacaaactacttccctgccgctacaacacggacagcaaccgggtggaagcccggttcgaggatggcaccacccttgccatcgactgcatcgccgtcgaggatgagtacagcaacaccccggcacagcgggcggagctggactggctgctgtataataagccgctggagtatgcacagcttgtgctgggtggaaggatggaacgttatctgtcgcttggctgtgaccacggcagaatggaagattaagcccttataaagaacacgatgcccgccgacctatggttttcgccataagctggtgggcatctgttgttctggtttataattcactgatggttgcagtaatgggctgcatgaggattcgcctgaccgggttatatactgccagcaccacagccgccagcacgactacgacaatcacggcaagacagccccacggcatctgccacgctgcaccgaaataatgggtgatgagcaggatatatagcttccgattcagcacaagacccagcgcaatgcccaccacaagaccggacaccgcataggtgccagcttcggcagagatcatgcgtttcagctgtgcatcatccatcccgatggcacgcaggataccatactgcttcattcgtgccgacacgctcatggaaatgctgttgacgatgttcagaatggtgattcctgcaatcacgatgagaaacgcatagaccaccagatggaacgcccagtaggtgctttgtatcatccgatttccttcgattcggttggaaaaaacaacctgcttgtttaacgtgtcgctcagcagggtgtgtatttgtgcaatggctgcgtctgctgtggtatcttttagttgaatatcgatcaccgcatagcggttttgcccggtcagctgatggaaggtttcttcggtgcagataacaatcggggaatcggtactactgaacgggctgtcgttcaatacacccacgactgtgagctttgcatcctccagctggatggtatcacccacggtcagggagttgcttttgtcgaataccgtcagcacagggtatgtgccatcctccggctcctgcggaagggttccgccaatcaggtcttttttcgcccagccaaactgtatcgtatcgtatgaaatcaggtcgatgaacccctgttttccctgatattccgccgggagcgggcaatacatccgcccgaatgcgtgtttgacttccggcagagcttccagctgctccaccagcaccgggtcaaggacattttgcccggatgtttcagccaccgataagtccggtgcgtaggactgcaacggattcagcgcaaatccaacccatcgaagcaaaaccgaaaagctcaaaaacaggagaatgcttaacgcaaaggaacctgtcatcagaagcaagttctttttggacgagattgcatggctcacgcccaaagaaagctctgcacgacttccaaacaaccgagcatgacacggagaacccgctgcattttccaccgcattcccagttgctgctgtgatcggagaagcttttgccgcccgccgtgccggagaagatgccgcgaaccaaaccgtgataagtcccagcgcggaaccacagataataccgaccgggctgatgccaagcactggtaaagagctgaactcctcgccgataaatctacgcagaaaggaacacaatccccatgtggaaacgattcccagcacacatcctgctggaacagcagttttacaccagaaaagagcttccagccggacaagcatccgaacctgattttttcctgccccaagacaacgcagcattccataatagctggtgcgctgagctacattgctgttgatgctgcctgtgatcataaaaattccggcaaggacgaccatgccagccaacacagccgctaccgcatataagcctacaatataatcgttgttgctgcttgcgttcaacgccatcaggtaagtattttcggagattttttcttctgaaattccgtacttgttttcgatgttcacaatggactgccgcaaattggtatgtggcttgaactggatgaaatactgtgtttcaaaggattcttctgcctgtgcggcaatctgagaaaatgtactgcggttcatcaccagcacaacagcatcatactggttcgcatcggaggtatcctcattgaaacctgcgacagtaagcgaaatggtctgtccatccgggagcgtcagcggaatcgctgtaccgaccgtaacatccagccaatcccggatgtttgctgtcacgagcacgtcgccatccgccggggcagtgctacactgcattcccggaaagatttgaaggatcgcgtcatctgctcctaccagtgcggcacgtttatctccggcaaagtagttttccttaagggaagcgttgatatcgctatacgccgaaaatgcagcaacatcctcctgtgcggcaagctctgcggctgtttcaggggagatgtcctttaccatgatatgccagtttccgtttttgttcagctggtttgaggtttccatccgaatcgccatatctgccatactaaacaccgctgtgaccagaaacaccgcaaggacgatgcacaggatggtcatgcggttctgccgtctgcgtaccttggcagaaatcgggatcaggctcagatagcttttcatttctgtgctgctcattcccggcacctcccaaaatcggtcaggcagccgtccgacacctgcaacacccggtctgccgtctgcgcaatgctgcggttgtgggtgatcatcagaatggtctgctcgtatttccgggatgtttcttttagcagggcaatgacctcgctggtgttctgggtgtccagattgccggtcggctcatccgccaaaatcagggaagggcgggtcatcagggcgcggccaatggctacccgttgctgctgcccaccggaaagctgacttggcagatgctttcgacggtctttcagattcagcacggtcagcagttcttccagatatgccctgtccggcttttggtagtccagcagcaccgggaacaggatgttctgttctacggtcagttccgggatgaggttgaatgcctgaaagataaaaccgatattgcggcggcggaagatcgtcagctcccggtctttcatggcaaaaacatccttgccatcaatcagcaccttgccggaagtcggcgtatccagtccgccaatcaggttgagcagggtgcttttgccggagccggattcgccaacgaccgccacatattcgcctttcggcactgaaaagctaacatctttcagcgcatggacagcagtttctccgctgccgtaggtcttgcagagatggttgacttctaatagttccatagtgtatccctcactttgcaggttccttcgattcagacggattatctctgtctgtgcagaaaaggataacacgtcaaccttactgcaagcctacactcagcctacaattttgtaggaatcggaaaattcagagtgaaggtcgtgccctttcccagctcgctgtctacttcaatggtgccgtgatgggcttccacaacggcttttgccagcggcagacccagcccgatgccctgtgtatcctgtgaaaagcggctgcgataaaaccgtttgaagatatggtacaaatcttccgggtggatgccgctgccgttgtcgcgtactttgatctgaaccatggacggcagtgcattccactctacctgaatcgtatctccgttctttgtgtggtcaagggcattctttacaagattgtccacagcttcctgcatccagtcacggtcgcaccaaagtgtaaccgcctctgagccggacagaacaagctttttctgttcctgctctgcacgatagtgatactgccgcgcgatgtcctgcaccatttcagcaacattttcgtttttcttctccaagacgaccgagccggcatccagccgggtgattttgagcagattctgcaccagagtttcgatgcggtccaactcctgttcggacaggtctgtaaactctttgacctccgacggcgaaacagcttcgtcctgaagcagaccgttgtagatattcaacgccgccagcggtgttttgagctggtgcgaaatatctgcaatggtatttttcaaaaaacgcttctcccgctgctcgttgtctgcgtgtgcgctcagaactgccgccaatgcattaacggagtgaaacagacggtaaaattctccctcccggtcgcagtccagtcgtgcatccgggttgccatccagacagctttggatttgctggactgcctgttccagaagcgcgctctgcctttggaaatagcgaaaaagcacgccccagagacagccgcccagaagcagaaaaaccaatagtaacccgaaagaaaatacatgcgtcgtatgccatacgatgccctgcgtgagagccaatgccaccgcccagaccgccagcactgtccggaacaaaatccggatttcccggtttgcgaatactttcatacggcacctttacccattccatttatagcccatgccgcggacagtcagcagcatctgcggtttgccggggtcgtcctcgatcttcatccgcagccgccggatgtacactgttaaggcactgctgtcaatgtaatccccatcgcagtcccacagtgcatccagaatttgttccttggatagcacggcattcggatgctgcataaagaagcagagcagcttgtactctgcgccggtcagttccagcaagattccgtttttgtatgcctgcccctgcaacagccggacggtgatgctgcccgattccagtacgggttctcctgcgctggacgcatttgcacggcgaagcagtgcattgacccgcgacaataggacacccagcttgaacggcttggtcaggtaatcatccccgcccagttccagtcccatgatgatattcatttcctcatccgaagcggtcaggaacagaatcggcacgttggatgtgcgccgcaccttctggcagaaatcgaagccagagccatccggcagagaaacatccagcaccagcaggtcatattttctgtctgaccacagcacctcggcttctgccagcgtccgggctgtatccagtgcaaagccctgtttcttgaatgcaaaagtcagcccactgatcaggctcagatcatcttccaaaaggaacagttttctcatgattccctctcttttctgcgttttgtgtgtcctacaggttcaaaagcattataagttttttctgcgaacattacaatgtgcgaaacggagattgtttcttgccgtgtgttaaatataagtcctactatcaccgctttactgcaataaaacttgcaaaaccatcttgacgcgctccgcaatccatgatactctttatcgcaaatcccaccgagcttgtcggggcaatgcccctccatcttgctgcgcaagaccgctctgccgcttaaaagccccactggggctttcattgctacgcaaacgcggactttcagaaaagtacagagcggcgaggatttattccccatgaagatttttaccgccccgcaacacatccgatctattttgccgccgattcacccgacaaaatcatcgctgcgctgcgtgggcggtatttttctttttcacaaataaaatcttatatagttgttcaatcttccaaaatttgtttttggttgttgactgcacaactgaaaagtgttattcttgtgcttgaaagaagcaggttgtagtgtccgcaccgtggaacggcagcccttcatggacaagccgtgcgactgggaagcgggcaagaagcaccgctgcacctctgccatgctccggcaccttcgtgtcgctgtcatggagatgtgcgagcaagccgacctgaaccagatcaacctgctggaagcccaaggcgaccatgtttcggagcgcgagtattgggcgcagcggcgcggacaacgccgcctcgaccatgccaacgccaaacttgccgccgaagggcagcagcccacccagaccgtctaccagaccgagctggacaagctgcgaaagcagatctacgcttgcattaaaaacgaactccgcgataactttttaagaaaacttcgtttgctttcaatagcttttcatagtattcacgataagaactgctcaaccgccgcatagcagggataaagacatcattgtacccgttttctcgatttaactgtgcgaatagttcttgaagtctgtaacccggagtgtttttgtacgcgtcagatgctttgacttccttataccgctcaaacatctccctattatctttcagatattgttcagggtcttgtattgcagcagcaacacttgcagcagctttttttgacacgtcaacaagatcaatggttttcgcaacatcgtcgagatattctttcaaatcatccgggataacaatattcacaccatctaaaaaatcaattatcgtttcaaatgcatcttgctgttcgtctgttgcaaccctctcattcaggtacggtgcaaaatggagactgataaatttcccgaaatatcccggaaaacggtcaagcaatcttgaaagaatagagcgcttcgtttcgagctggctcaattgcgcccgggcatcctcccaattctggtttctcgcaagcatgtggagtaattgttgtttcgcttgtatatccgaaatttccagttctttcttgtcgcatatagtttgaaaggataaatagtcattctctgccaaaaccgttttaatgtccgatactgatattccaagcccgcgtaaaactgcgatcttgtttaattggatgacatcatcctctgaaaacaccctgtaaccattttccataatttgagggcgagttaagccttgttcctcataatactcaatcgcctttttggtaaggccacatctcttgcagacttcattgataagcatattatcacctccactagtatgataagcccacccccaaggggacagtcaatagctttttcaaaaattctcttgattgggcaaggtgtgtacgatatgtaatgccatctccgcattttctttgtccacaaatacctccgtgatatacttcggttttatacccagcgttccgattcttgcctgatcgaacgcattacgccgattggcatctttggttttgcaataaaacttgattcccgcagccgccaacgcatccgtgatgcagttgcattggtaaggatcggaaactgttgcaatttgtgatttgaaaagctgctctaacataaatacccctcctaccgatcgtttgaaaaggacacaatttcaaatgtctttattggaataacgtaatttaatctcaatttatttcgttcgtccataaatttccaaaagtttgtgtgtctgtatataaatcttctgaaaatttgtagcacaatcacaatgtttttcatttggataaatcgatagaaccacttcgtccgtgaaagaccgtgaccctgcccgggtggataacccgttccttatcgaagagctgtccgaggagcgtcccggcatcctgctgtggatgctggaggggctgcaccgtctgctggcgaaccgctatcagttcaccatcagcgagcgctccatccagaacctcgaagcagccatggcggacagcgacaacctgacccagttcatgcaggcaacggcgtatgtccgcttcaagcccgacaccgaggaacgctccacctacctctatcgcgcctacaccaagtggtgcgaggataatctggaatcgcctgttccgcaaaagaagttcagccagttcctgctgaaaaatgcagggaagtatggcctgaccttttccaagcacatcgagggaaagtaccgcggcttccggggcgtatgcgtccaccccgcctttgctgcggcataaaacacacgaaaagtgaaaaactcccgccctacgcgccctaaagccatggttttgacttgttatcgctgttttctccgggcgcgtatctgccctttccgggcggatgcagggcggcaacgcgcccttcggggcgggaaagaaacccggatgcgccccaaaagggcgcgtccatcccagccatgcgccctgtaaaattcacgcagaaaggcacttttgtgtggtttggggcgcgtagggcgcgtaaattcaagttctcgcacttttttgggctgctgcttcgggtcaggagcggcaggcccttacatatttaccggcccacagggtgcagctcaaccggaactgcgccgggtctggagaagtgcaaaggagacatgcctatgacgaatgtccgcaaaaattccgctaaactgacccgtgaggacttgaaaatcgcgcccgaatcccctacaatgaaacgtcaggaacttgcagttccatgcgaattttctgtcagaaattccatggtaatttctgacgaaacttcggaccaaacccctgccgtagaaccttctgaccagaccagcaaaaccgtccgacacgccccgcttgtctaccgggtggaggagattgcccagcttttggcgatctccaaccgtgctgcgtacaatctgtgcaacaccacgaaagatttcaaggtgatccgccttggtaccagcatccgggtaagcaagcagagcttcgatgattggtttgcagcggtctgagggagggaacatctatggcatctattatgccgatgcctgccaaggcaggcaaaaacatatttgcgcgcagcgcacactgctaggcatacgaagtatgaaacgtggcaacacgtattccgtccgatacaactacaaagatcatgctggcaagccctgcaagggctgggaaaccttcaagaccaaggccgaagcgcaggagcgcaagatcacagtggagaaggaactgctggacggcaccttcctcgtgcccgacaccatgacggtggaggagatgctgtacaagtggattcccattcagtccagcaaacacaagtggtctcccaagacctacacccaatctgtggcgatggtgcagaacctcatcgtgccgtatatcggaaagcggaaggtgcaagacctccgcacctacgacattgagcagttctacgccaccctgagccagaccccttgcggccagtacgttcacggcgaaaagcaggagctgacggaaaatcagaagaagcggctgttatccagcacgtccattcacgaagtccacacgctcctgaagaccgccttttcgtatgccgttgactgggatctgatccacaaatcgcttactccccgtgaagcccccaagatcaataccgaagaacgcaccatctgggatgagcgcaccatgttggcagcgctgcagaccatcgagaaccctgccctgcatctggctgtgcacatgagcatgatcctttccttgcgagagggtgagatcctcggcttgcagccgggagacctcgactttgatgcagcagacggacggggaaccatctcggtgaacaaagccctgcagcgtgccgacaaggtcgccttgtccaagatcgaccccacccagatctaccacaccttcccggacagacgggaggggagcaagtcctcgctgatcctcaagcgaactaagaccaaaaagtccaaccgcatcctgtacatgaccaagcccttgaaagaggagcttctggcatggctggaaaagatgaagcaggacgagcagagcgccccggaaaagtacagcaactgcggtcagctgttccgcttaccagacggcttacccattgccccggacgttctgaccaagtggtaccgtatgtggagggcagaacacccggaatttgagaagatcgtgttccacggtctgcgccactccagtgccacctaccagctgctgcaatctggcggtgacttcaagtcggtgcagggtaataccggtcacgcaaccgccaccgtcctgatggacacctacgcccacacgcaggacaaaccccggttggagttgaccgagaagatcgaagccgacttctacacgcaggatgtggcaggtgcgaagccacaggaacccccggaaaacaaaacgccggtggcaacaaaaatcacgggtaaaatgatccttgaagccatccggcagatggacgcagaggagcgccgcgagctgacgcgggtactcttcgcgtaaaagattcttttttgtgcagcgaaatacacgctgtgcaagcgatgcaaagatttcatggcttttttgtaaagtgtgcaggagatgtgcaaaagtgtgcagcccctgccagaaaaacaaaaaagccatgaaatctttcgatttcacggcattttctggtgcgatggaagggactcgaacccccggcctactgattcgtagtcagtcactctatccagctgagctaccaacgcatacgttccgttcggaacatgatgtattttatcacgaaggaaggggtttgtcaacagcttttttaaaatatttttatattttccaaaaaagaacgtcttttctttgattttactgcggcttttctgtaattcttctgccacatcggcgcaaaaagcggcttctacggccgctttttgcccgccgggcgggggagagtgggcgtggcgctcagtcctcctgcgccagctgacgggcgatctttacaccggtgggggtggcggcaaggccgccctgaccggtctcgcgcaggtcgggggagagcagactgcccacgcgacccatggcgtcgatgacctcgtcgcaggggatggcatagtccaccccggccagtgccatgttggcgcaggagactgcgttcaccgcgcccaccacgttgcgcttgatgcagggcacttccaccagaccggctaccgggtcgcagaccagacccagcaggttgcccagcgccatggcggcggcggcagcgcactgctccggggtgccgcccttcaggttacacagggcggcggcagccatagcactggctgcgcctacctcggcctgacagccgccctctgcgcccgccagcgtggcgcgggcggcgatgacctgcccgaagcctgccgccacatacagtgcatcgcagacggcctcctcgtctgcctgcccggcgcgggccagcggcagcagcaccgccggcagcaccccacaactgcccgccgtgggcgcggccacgatgcgcttcatgcaggcgttgcactcggcggtttttagggcttccgctgttactgcggccagataatcatcgcccagcaggcgtccctgctgccacgcctgctccaccttggcggcatcgccgccggaaaggccgctgcggctgcgctgcgtggggtcgtattcctgactggtggcctgcatcacctgccacaaatgccgcatggcggcgcggctgtgcgcctcggtcaggcggctctcctccaaatcgctgcgcagcaccgcttctgccagcgtgatcttctggctgcgggcggcggccagcatctcttcacaggacaaaaatgccatggctcattcctccgtttcttccggctcgtccacgttcagacaggtcaccttcagcaggcccggcatcaccgccagctgccgctccagcgcgtgggggatgtgggagtcgcactccagtaccatcaccgcatagccgcccgcagcggcgcggaacacctgcatggacgcgatattgatgcgccgcagtgccagcgccatggtcacctcggcaatgcagccgggggtgtcctcgttgtggatgatgagggtgttgctgtccccgccgaaatccgccggtacgccgtcgatctccgtgacgcggatgcgtccgccgcccaccgacgccgccttgagcgaaagctgccgcccggtgcggctggtcagggtgagcacggcggtgttggggtgggcagagcgcagctctaccgggtggatgctgaactgcatcccccgctgcgcggccaatgcaaagctgtccggcaggcgggggtcgtccgggcgcaggcccagcagccccgccaccaatgcacggtcggtgccgtgccctttgccggtggtggcaaagctgccgtacaggccaatgtctgcctgcgccggcacttcgcccagaagcttttgtgcggtatagccgatctttgccgcaccggcggtgtggctggaagagggtccgatcatcaccgggcccagaacatcaaataatcgcataggggacagccttcctttcctgagggttttcccacttttgcgcggcagctgctgccgcaaaacgcgcttttttcctgcttgaatggactaaaattgccaaaacggcacatttttatcaagtttattataccgcttttgctgcacttgtgctataataactttattaatgtttgaaaatgtccccaaaatggcgttctggctgctgccttgcagcgccgccccgccgccaagggaacaacacggagggtagatcctatgaaactggtaagcgtggaaactcctgaaaagagtgtctgcaaaatgaccttcagcgctacggctgaggaactggaggccgcctccaatgcggtctatgagcgcacccgcgccacttataccatcaagggcttccagaagggcgaggccgaccgcgcacagatcgaggctgaccgcggcgagcacaccttctggtacgatgccatcaacgacctgatggatcaggatgtgcctgctttgtacgaggctgctttgaaagaacacggctttgcgccggtggatgatcccagctacgatctggtaagcgtgaaaaaggacgagggctttgtggctaccgccaccgtggcgctgcagcccgagttgaagctgaccaagaccaccggctttacctcccagtgcgtcaccccggaggtgaccgacaaggagatcgacacggtgctggagcgccgccgcaactatgccgcagagctggtgccccacaagggccccgctgtaaagggcaacgtggtgcacatggactttgagggtcttctggacggtgtggcctttaagggcggcacggcaaaggaccagtccgtgcagctgggcagcggccgcatgatccccggtttcgaggatggcattctgggccacaaggcaggggacgagttcgagatcaacgtcaccttccccaagaactaccccaacaaggagctggccggcaagcccgttgtgttcaagatcaagctgcatgacgtgtgcgtgcgtcagctgcctgccctgaacagcgattttgccaagaagatgggcaaggagaccatggaggagtaccgcgccttcgtgaagcagcagctgttcgatggccgccacggcggtgcgctgaaccacgccaaggatcagatccttggtcagctggccgatgccgcagagggcgagatccccagcattctggtggaaaacgcctaccagcagcagatgcaggtcatccagcagcagctgcagatgcagcgcatgagcctgaccacctatctgagccagatccacgagacccgcgagagctttactgccaaggtgcgtgccgccgcagagaagaacacccgcgcccgtatggcactgctacagatcgcacagcaggagaacctgctgcccaccgatgaggagatcgacaagcagctggctgagcgcgccgaaaagaccaaaaagacggtggaagagatcaaggcaggcaccgacgttgccgccctgcgccgcaacgagggcatccgcaaggctgccgattgggtcatcgaccactccaccatcgaggaaaaggtagagagcaagtaagcgctgacggtttggaatgcgcgccgcgctgctctgcgcatcaatagaggaaaaacaattttaaatttgagaaccgggaaaatctgcggattttcccggttcatttttcacagaaaggaatgcagttctcctttacgacctttcccgtgaaaatgcaatgccgggcggtccgcagaccgcccggcattgatctatttaagaataatacttccgctgattatgcgcagagcagcgcggcgcgcatttaaatcgtttttcaggtcagaaggttgaagcccatgatgaccacgcccagcaccaccagcacgacgccggtggcgcggttcagggtcttgggagtggccttgttggcaaacacggcggcaatgcgcgcccacagcagggtgaacaccacgcacaagccccataccagccaatcaggcgtgccgccgatcataaagtgggacaccgcaccggtcagggcggtaaaggtcatgatgaacacgctggtgcccacggcagttttcaactcgtagcccagcacgctggtgaggatgagcagcatcatcatgccgccgcccgcgccgataaagccgcagatgaagccgataagcacgccgcacaccaccgactgcaccgcacgcttttgcgcgctgaccccctgcatggcttccttggtggtcatgaccgggcgcaggatgaacttgacacccaacaagaaggtcatgaacaccgagaagccgcccatggtggcggagggcatcttgctggccacccagctgcccaccaccgtaaaggcaagcacgcttgccatcatgatcaggccgtttttgatgtccagattcttgtttttatggtaggtataggcagacaccgcactggccagcacatccgaggaaagggcaatgcccaccgccatgtaggggtccatgtgcagaaaggtgatcagcatggggctgatgaccgccgccgcgctcataccggcaaagccggtgccaaggccggcacccatgccggcaaaaaaggtgacaagcaccgtaaacagcaagtgcattttatccattctcctttaagatctcgtccagatttttcccgatgacctccatggtgcggaagaacgcctcccgggtgggagcgtccgtgttgtccagcaggcgggcaaaaaagcgctcctgcacctcgcgcccccgtgcgatgaccggctgcgccttttcggtgcacagcagctgggtcttgcggcggtcgcccgccacggcgcggcgctccagatacccctcctgcaccagacgatccacgtttaccgacacaaggttcgctttgatcttgcggatctccacgatatcccgggcagtggtgcagtccgggttgtttgccagaaacatcaggatgtcaaaggcggtctggggcagcttgagttcctgacacagcggcttgcacatggcgctgtacgcctgcgcggtcttgaagctgatctctatggtagggttcatgcggcgctcctttttgtctttttatggacagttcatttttgaagtattatagtgcagatgcagggagatgtcaagagaaaaagagaaccagcacgtcctgcggacgcgccggttctctttttcaatatgatgattgcgttcagaacagtgccacggcgaccagacgcaccagcagggcgcacagccatgccacggcgcactggttcaccaccatgatggttgcccacttgccgccaagctcccgcttgaccgaggccactgccgcgatgcagggggtgtacagcaggcagaacaccagcagcggtgcagcctgcgctggggtgagggctgcggtcagggcagcggtagagccgaagaggatgagcagcgaggacaccacgctctccttggccataaagccggagataagggcggtggagatgcgccagtccgcaaagcccagcggggcaaacagcggggcgatatcgcccgcgatgcgcgccagaatgctggtctgcgggtcggcggtcagcgacaggcgcaggtcaaagttctgcaagaaccagatgatgatggtggcaccaaagatgaccgtaaaggctctctgcaaaaagtcccgcgccttttcccacagcaactgcgccacgtttttcaggccgggcaggcggtaattgggcagctccatgacaaagggcacggcttcgcccttgaacacggtgctcttgagcagcagcgccgccagcacgcccaccaagatgccggtgaagtacagcagcaccatcacaagccctgcgtacttggggaagaacgccgccgcaaacaggctgtaaataggcagctttgcggagcagctcatgaacggcgtaagcagaatggtcattttgcggtcgcgctccgagggcagggtgcggcttgccatcacgccgggcacggtacagccaaagccgatgagcatgggcacgatgctgcggccggacaggccgatgcggcgcagcagcttatccatcacaaaggcgacacgcgccatgtagccggtatcctccagcatggagaggaagaagaacagcaccacgatgatgggcagaaagctcagcacgctgcccacgccggtaaagataccgtcgatgaccagcgagtgcaccgccgcgttgacgttccagttggtcagggcggtgtccacaacgccggtcagggcatcgatgcccatctccatgaggttctggaagaacaggccgatgacattgaaggtgaggaagaacaccagacccatgatggcgataaacgccgggatggcggtgtacttgccggtgaggaacttgtcgatgcggttggagcgcagctgctccttgctttcgtggggttttaccaccgtctgcgccaccagctcctgaatgaaggagaaccgcatatccgcaatggcggcggcgcggtccagcccgcgctcctgctccatctgcacgatgatgtgctcgatcatttctttttcgttggggtccagcttcaaggcttcctcaatgcgagggtcgccctccaccagcttggtggcggcaaaacgcaccgggatgcccgccgccttggcgtgatcctcgatgaggtgcaggatgccgtggatgcagcggtgcaccgcgccgccgtggtcatcctcgctgcagaaatccatgcgcccggggcgctcctgatactttgccacatggacagcgtggtctaccagctcgtccacgccctcgttcttggcggcggagatggggatgaccgggatgcccagcatggcttccatcttgttgatgcgcaccgtgccgccattgccgcgcatttcgtccatcatgttcagcgccagcaccatggggatatccagctccatcaactgcatggtcaggtagaggttgcgctcgatgttggtggcgtccacgatgttgatgatgccggtgggcttttcgccgatgatgaactgccgggtaacgatctcctcgctggaatagggggacatggaatagatgcccggcaggtcggtgacctcggtctccgggtgccccttgatggcaccgctcttgcggtccaccgtcacacccggaaagttgccaacgtgctggttggagccggtgagctggttgaacagggtagtcttgccgcagttctggttgcccgccagcgcaaaggtcagggtcttatcctccggcaggggatgctccccctccttggtgtggtacttgccgccctcgccaagacccgggtgctccaccatttttccgtccaccgggacgtgcaccgccggggtcttttcggtgggggtcacggtgatctgtgccgcgtcgtccagacgcagggtcagctcatagccgtggatgcgcagctccatggggtcgcccatgggcgccagctttaccagcgtgacctctgctccggggatcagacccatatccagaaagtgctgccgcagcgcgcctgcaccgcccacagcatccactatggcgcttttgccgatctgtaactcttttaacgtcatatccgttgccttcttttatatgtactgttcttatgtgttagtccgtgttaacaaatgtagtataggctaactgacagcggatgtcaatagagaatatagacataaaaaaagcaccgcacactctcaggcgagaatatgcggtgctccggttcaaatcattattacttcacggtgtggtagccatcggggttattcttctgccagttccagctgtcggcgcacatttcctcgatgccgtactcagccacccagcccagctcgttcttggccttggtggggtctgcgtagcactcggcgatatcaccggggcggcgcgggtcgatgacgtaggggatctccttgccgcaggccttggagaaggcgtggatgacatccagcacgctgtaacccttgccggtgcccagattgcagatgaagagaccacagccggtctccagcttgcggatggcgcacacatggccccgggccagatccacaacatggatgtagtcacgcacaccggtgccgtccggggtggggtagtcgttgccaaagacgtgcaccttttccagcttgcccacagccaccttggcaatgtagggcatcaggttgttggggatgccgttggggtcctcgccgatcaggccgctcttgtgggcgccgatggggttgaagtagcgcagcagcgccacattcaggctggggtcagccttgcagacgtcctgcagaatgcgctcggtgaaggccttggtggtgccgtaggggttggtggtagcacccacagggaagtcctcagtgatgggcacactggcggggtcgccgtagacggtagcggaggagctgaacacgaagttgtggcaatcatgatggcgcatcacgtccagaatgaccagcgtgcagttgaggttattgtagtagtactcgatgggcttggacacgctctcgcccacagccttgtaggctgcaaactggatgacggcggtgatgtccgggcactcggagaagatcttctccacatcctcgcggcgggtcatgtctgccttgtagaagcggaaatccttgccggtgatctgcttgacccggtccagaaccacaggagaagcattataatagttatctgccaccacgatatcgtagccagcgttcaacagttcgatgcaggtgtggctgccgatgtagccggcaccgccggaaaccaaaattgccatagccgagtacctctctcacatagtatttcttgctttttctctttgcgccgggcgctgcccggtctgcttaaagcataccgctttttgccgccgactgcaaggggcgctttctttattcagatatatttttgttgcatcttttcgcattacacttttgattgacagagatttttcgcacttttcacatggagagaatgcgccgtttgtgcaaaacatagaaatggagagggaaactccctcagtcgcagcctcccaccacgcaaaaacgtctgccgaagcagacgtttttgcgtggtgtatcatttttaaagctttccgcactgcttgccggtgaagaaccgcagggtggtggtggcacggaataccttgccagcccgcagcaccgtggaggggaactccgggtgagaggggctgcacggatagtgctgggtctccaaggcaaagccgccgtacttccgcatgggctcgccgcccttgcccggggcggggcagtcctgcaaaaagttaccggtgtacagctggatgcccggctgggtggtgtacagcttcatgctgatgccggtcttatcgctggtcgcccatgcgcagatgctctggctggagccgcgtgcgcggccgatgacgtagcagtggtcgtagccgccgcccaccatggtggtctgggagaagccggtgtcgatctccttgccgatggtcttaccggcagtaaagtccatgggggtgtttgccacgggcaggatgttgccggtggggcaggtggcgttgttgccttccagatagcgggaagcgtagatgcgcagcttctggttcagcacatcgccgccgccatccagattgaagtagctgtggttggtcaggtttacgatcgtgtcggcgtccgaggacacacggtagtccatgcggaaggtattatcgtcggtgagggtatagcgcaccgcgatcttcagggtgccgggaaaaccatcctcgccgtcggggcttacagcttccatcagcagggtgtcgccgaagtacttcacctcatagattttccgggaaaaacagccgtgcaggtggttttcgccgttgtttttttccagctggtaggtcttgccgcccaaggtaaagacggcgttctcgatgcggtttgcgtagcgtcccacaaaagcaccgcagcaggtgctgccggacgaggtgaagtcgttttcgtaatctgccatggtgtcgtgacccagcaccacatccaccgggccgtttttggccgggacgatgatatttttgatcacgcagccgtaatccagcacactgacggacataccgccggggttcgagaggatatactcggtaacattagcgccctctttggtcacaccgaagggcttggaacggatctgtgccattgggcctcgcctcctaaagcttttttcggaaatgcaaaaggggcagactgcccccttttgcatcttgtctgtatttatgattatatcacagttttacagttttgtgttggaatccttttagaattaccatccaatttttgcggcgattttttgttggaatcatcgaaagtgcctacaatagcaaaaagcgccccgcacttccggtggaaatgcggggcgctttggtgatacgggcttgttcgccttatgcttccggctgaggctgtgccgcagaggactgggcggcaatgaactcggcggcatcgtccgggatgtcgtccaagtcctcgtcgctgccgatatccacgttgagcggcggcttcttgaacaggatatcgtacagaatcggcacgatatacagggtcatcagggtggcgtagctcaggccgcagatgatgacgatggccataccgctcatcagctggcttgccatatcgttgctgaacaccatttgcagcatggccagcacggtggtcagggtggtcatcagaatgggacgcatacgggtcttgccggtagccaccagtgcggcgcggcgctccatgccgcccatgcgcagctggttggcgtagtccacgaacacgatgccgttgttgacgaccgtacccatcagcacgatgaagcccatcatggagatcatggtcagctgctggccggtgagcagcagacccagcagaccgccggtaaaggccagcggcacggtgaacagcacgatgaagggggacagcaggctctggaactgtgccaccatgacaaggtagacaaagggcagggccagggccatccactggatcatctcgtcggtcatatagttgacgctgtcgctctcgccgcccatggagaaggagcagccttccggcatctcgtcggtgagggcaaaggcatccagtgcctttttcacggcacgcgcctgcaccgtggtgttgtagcccggggcagtctcggcagtgacggtgacgaactggttccggttctcgctggtgatggagtccggtgcggtgccggtggtccagctggcgatatccgacagcttgcaggttccggtggcggtggtgccgtctgcggacatgacggtggtctcaaaggtcatgtccatcatgttttccttggtcagcggatccagattgttgctgatctggacatccatggtggtgccgtccacggtaacaggggtctgtgccgtggtggtggtggtcagctttgcagcgatctgctggtacacctgcgcaacggtcaggccgttggcgcgcaccttgtcgcggtccacctgcaggatgatggtggaatcgcccgcgcccagaccgttggtggcgttctggaagccctcggtgttgttcacgatgtctaccaccttctcggacagggcggtcagggtctcggcatcggtgccgtagattttgatggtcagacctgtggacagctgactggtcaggtcatcggtcatgccgtactgctggacggtggcggtgcagtccgccaccccggccacagcgtcctccatggccttgcaggcggcgtcgatcttggaagaggagagctcctcgttgagcttgacgttgatcttatacttgccgtagccattggcggcgttcagcaggtcagtgatggtggagggcaggccaaggttggaaacatccatgcccgccacagtgttgtcgggggtaatgcctacctcctccacgccgtccacagccatcacagcctgtaccaccttaccggccacatcgtaggactcctccttcgagagggtgtcggtggtggaaagggtgatcagggcctcgttgctggtgctggtgggcagcagcacgatgcccatggagaccacccgccagcagcagaacaccagcagcagcacggcggctgccagcggcacaaagcgcttctgcaaagccttttccagactgcggccataggcgttctggatcttatcgaaccatgccagctttttgggctgggcattcttcagcacggtagccgaggcggcgggcaccacagtcagtgccacgatgagagaagccatcaggcagtagccgatgcacagggacatgggacccatcaggttgcggatgaggctggcagagaacactgccggcaggaacacgcacaccgaggtaagggtagaggccacgaccgacatacccacctgacgtgcaccctgcaccgcagcgcgggcggcgggcacgccgcggccgcgcagacggtagatgttctcgatgacaacgacagagttatccaccagcataccgatgcccagcgacaggccggccagcgtcatgacgttcaggtcaagacccgtgaagtacatcagcaccacggcaaacagcaccgacagggggatactgacgccgaccaccagcgtgggcttgacgtccttcaggaagatggccagcacgacgatggccagtgcggcacccaccagcatactggtgaggatgctcttgatgaggatgctgatgtagttgccctgattggacagcaccacaacgtgcagaccctcgtactgggcttccagctccttgaaagcatccagacagttggcagatacatcacctgcgctggaactgtcgtccttgtaaattttcagcaccgaggcctgctcgccgttcaggcgggtgtagctgtcggcggcgttgtcgatgatctccacgtctgccacatcggaaaggcgcacgtcgccgtagccctccacatggagcagcagtgcaccgcggatatcgtccacgctgtcgtattcctcgcccaccttcagcagccacgactcgccgctttcgtccttgacgtaaccggcgggcatggagaagttctgggcgtagatgagggtggcaagggtcttgatatccagctgcttggtcacatcggcgctggcaagcgccttttccttggcggcctcgtactgggtcttggcctcgctgagctgcttttcgtactcattcagctgctcgcgggcttcggtaaactgcatataggcgaccatctgctgctgggtaaagttgcccagcgctttggagaactcgctcatcatgccgggcacgttgtccatggccttgatggtatcttccagcgtcttatagatgacgttcaggctgtcctgcaattgcagctcgtctgccagatccgcagcgccctcgccctgcgtaccggtctcggtgttgatgcggttttgcagggtctgcaaagcagaggagagcttatcggtgatatcccgcagctcggacacgatctcgatcagggagtcgatatcccgcataccggtgttgttgaacttgtccatgacccgctgcaaaccggcctgcacctcgatgagtgcctgctgcacctcaggctccttgaccacggcgatcaggttgttgacgctttgcagcagcgcctccgcctgcttgcgcactacttctacggcttcgccgacctcggagctgagggtgcccatgaccgtgttggacacggtattgccgaagtttttgaactgcttatcgtattctgcgcggccggccttgatcttggcctcggcctcctccaactgtgtgtgcgccacttccagctgagtgtcgataagctccatcagcttttcgttgatggcgtccaccttttcctgattcagctgcacctgcaccagctgctccacaaggccgctggaggatacgctggacacgccgcccttgcgctggacgtagggggtcatggtgttcttgataaaatcagaaaggtcgtacaccgaactgccctcgcggctgacagccacggtcataaaggcgttcatgttcatgctgtactgtatcacagagggagtcagcgccgtctccggcaggtcgctcttggcctgatccagcttgttggacacctgcaccagtgcgctgtccatatccgtgtcatccacgaactgcatcagcagcaggctgtagttttcagccgaggtggcggtgatctttgaaacacccggcaccgtaagcgcgttttgcagcacgtccgagacctcggtctccacacgctccgggctggcaccgggatacacggtgaccaccatcagatacggtgtgctgacattcggcagcaggttggttttcatcttggtgatcgacacaaagccgagcatcagcaccatgatgactgcaaccagcaccgtaaatggttttttgacactgaatttttccatcttctcctaccgtttctctgccgcaccgcccggcgcaacagttcctccctctttgggggcaatgggttcctaacattcctattatacacgcaaggcgcgcgctttcaatagaggcgcagcgaatcttttgcgaaagttctgtcaaaatctgcgaaacgcacaactttgccgccccaaaaccggcattctgtctgctttcctcccttctgccgccggacagaattccgacacctttcccgtactgcatacggttgagcggggcggatcattgcaggggaggggaaattttactccctcagtcaaaacctgacggttttgccagctccctcggggagggaagctttgcggggtaaccggatacttggcggtttgaccggaaagcttttgtttgtcgagggatgttctcttttgacaccaaaagagaaccagaaaagtgccagcgatttcgacgcgctggagccacgaaaaaggggctgcaaatagaaaagtggtggtgctcacggtgagcaccaccactttagaagaaagaagttcctttgctgcttgtgcgccttaacgatctggaaacaatcacagaaaatcgaatttgagcatattaggtaagagcaagaatcgtcccgtggccacaaattttcaatttttgaaaattttctgcccatccgggacttcacttctcaaactcttgcgagtttccgaagtgctcttgttggggcgtgcctgccccaaaccctgctgtaaaagcagaaaatggaggtgtccaccatttttatacaccggagtaagccgagaagccgccgtccacgggcaggcagataccggtgatgaagcccgctgcgtcattgttcagcagaaagagcagcgcgcccacaaggtctttttcgctgtcgccgaagtgtcccatcggggtggcggcaaggatctttttggtgcgctcagtgggggtgccgtcctcgttgaagagcagctttgcgttctgctcgctggcaaagaagcctggggcgatggcgttgacccggatgcccaccttgctgaaatgcaccgccagccactgggtaaagttggtcacggcggctttggagccggagtaggcggggatcttggtcaggggcaggtaggcgttcatgctggaaatattcaggatattgcagccctcgcggcccaccatctgccgggcaaacgcctgcgtgggcagcagcgtgccgatgaagttcaggttgaacaccatctccacgccgctctcgtccagatcaaagaaggtgacggtgtcactttccagatcgcccatctcaaaatattccttgtcggtgttggcgcgggcgttgttgccgccggcaccgttcacaaggatatcacaggggccaaggtctgccagcacatcctcggctacctgcaggcagtttgccttgttcatcacgttgcaggtgtagcccttggcggtgccgccctcggcctcgatctcgtctgcaagttccttgagcttgtccatgttgcggcccagcagggccaccttggcgcccgcccgggccagcgctttggcaaagatggagcatagcgtgccgctggcaccggtgacgaccgccacctttccggtgaggtcggtgttcagtacattctgtttcatgcggcacctcagctccggtattctgccggcagctgatccatggtccgccacttgtccatggcttcttccagcttcatgcccttggccactgcatcgcggcggcaggcgttgacagcctggatctccttcatcttggcgccggtcagggtgtagcccttcatggcgatgagggtagccgcccatgccaccatggggatgatgcagaacagcacgatgaccacccagttcatgcccggagtgtaagggtcatactgggtgggcaggctctgcaagcctacaaagctgacggcaatacccacaacagtagcggaaaggctggacaccagcttgtccaccagactgaacagggtgcccatgatgccggggatgtagttgccgctgcggtaggtctcgtagtcggagcagtcggcaaccatggggatgggcatatcggcggtggcgtagtaagcgccgtagccgatgccgaagaaggcaatgaacaggatggtgtacaggttcagggacaggccgttctctcccagaatggacagggtaaaggcgtcgccgcgtccccagagcagcaacagtaccagcacgcccacatagcacaccagcgccacgctgacgtacttcatcaggctggccttctggccctccttctggcttgtgcggacggtgagcaggaagaaaggtacactgcacacatagcccagcaccatcatgggcaggtacaggccgtcgtagttgcccatcatgcagccatacagcatgcacagcacggtggtgttggtggcgatggaaagtgccagcttgcagcctgcaccggccaccatcagccgctgcatggggttattgttcttgatgatctgaaggtactcgcttaccttgatcttctcggtcttttcgccgccgatgccaaagtacttgggctgatccttttcccagatgccgatgacggccagcagggtgagcagaatagaaataacgatgcccaccggcgccagcgtgcggaagaacccggcagaagcgtagccgccctcatagttcttggcaaggatgggtgcaaagaactgcatggcacccatgcccagcaggctgcccacggtattgaagatggtgaacagcggacgctgcttgggatcatttgtcaaaacggtctgaccggagcgggtgcagctggtctggaaggtgtagccgatgacccacacggcgtacagccccacaaaggcggcgtagcgcagccccatggcactggcggggatgagcggggtgaggcagtacagcaccagaatgcttgccgccatgatgaggttgccaatgaccataaaaggccggaacttgccgaacttgccgttggtgcggtccatgagggcaccgatgatggggtcggtgatggcgtcaaacagacgcataccggtgaccatcaccgaagcaaacagcatgctcagcgccagcaccttgctgccgaaggttgcgatataggaaagcaccagcacatagtacacattcgttgcgccgttgttcagcgggaacagcaccagctggtaggttttggcgcggttcacactcgacgccgttgttttttgttcgcccattgcggtctctccttttgtctttgataaaaaagcggcagcctgccccgccttcggggcaggctgccgtgatcggatgttaaaaactcacagggaaaagtctcttacttcgtcaccttgcagaaggaaccgatgatcatcgcaacaacggccacgacatagcagacgaggcaagccacggtgatgtaaaagacgtgccagccgaccatgttctgagagttgaaggagaacaggccggagatcagcaggatacggctgttgatgatgttgccgatcgttgcaacgatcagggcgatggctgccatggtagcggccagaccgatgatgccgttgtcatcctttcccttgttggctgcccagatgcctccggcgatcagaaccacggccaaaacgccctgaatgaccagacgggtcagagcagccagtgcattggcctcgctgtaagtgctgctcatcaccatggtaacgatgcctgcaacggcaaggacgatggcgactgcgttaaaatagaaggctgcgccctgttttttcagaaaggtcatatcagtgaacctccttcttgcttttcttgcggacggagaagacataacctgcgccgcaggcaaccgtcaggacgccggagaccgcgatcagagcgatgtaagccgcacgccaccaagtcatgctctggacgatgcgcgtggtgctgttatagcggttcatcaggttggaatgtgccattgcatacaggatgttgtgtgcagactccttgacgtgctgctgcaggttggcatccccgttcagcagagtgctgctgacagagctgccgtccacctgcgttgcaaaggtagagtcggtctcgagggtagtggagccgtagaagccggagataccacgggtatcaaaacaggtaacgccggaattcagcacagcaccgtacaggtcggtatcatcatagatatcggtgacagcgtagcccttgaagccccactccttcttcaggatattggtattcatgccaacgctggaggtgcactcgacgccgccgatcttggagaaggaggtcatcagaccgcgcatacctgcatcgtagtcgtcggtatcgtacttggtagcctcaaatgcgatctgataagcgcgcagctcgatctcgcgggcacgctgctcggtcatatagggagaaacgccgccgcgctcagactcctgatcgttgaaggcgtagtgcttgggagcggcgatcagaccgtactccagagcaccgatggcaaactccatgccggcattgccggtcaggacagggtcctcagagtagtactcgccgttacggccgttgtaagcctgacgatgggtgttcatgccggggccccacaggatggggatgccgacaaacagcgactcctcgcccacgaactcgccgacagccttgtacagctcgttgttgaaagaagctgcgaccagcggagcgtttgcaaagacttcggggtgccagttgccgttgggatcatctgcaccgatggtccagggagcattggtatccttggaagcattcaggttcacggcaacaccattgcctgcgttctcggtcatgtaggtctcgaccgtgccgatggactccacacccgggatgctggggccgccgtaggttgccagatactgtgcttcctcgagggtcatcttatccagcagctcgtcccacttcgggtcgtcaaagtccagaccgaacatctgatagaacatcagattactgttctcaccccacttgatatcggaggtgtcatcatcggttgcaatggtgtagtagttgccgttcaggtcgctgatcagcttctcgctggtcagggtcatctgatcgtaggttttggggaaggtacctgcccagtcggcgcgggtcagataggtgacctcgccgggctggtagtagttccagtcggcgtaggggatctggttggagatcttctcaccagtcttggaaacagagaaagcagtacgggaaatcagatcctcggtgatctcctgtgcaactgcagcagctgcgctgccggtgcccaccatcttggactcatctgcgccctgcagcaccagaatgttgttcagagcgtcatgtgcgccgttaccggctgcgaagtagtaggtgccgggatcgaggacataggtgccggtggtgccatcaccgttatcgtgctccatatcatagctggcgatgtactgcagatcgaccttgacagaaacgatctcggatgcgccgggtgccagttcgctggacttctcaaagttcagcagctggatcgcgaccttctccaaaccgccctcggtataaggagcctgaccgtagatctgcacagaggtcttgccgggaaccttgccggtgttggtgaccttcacattgaaggtagcgtaggcctgcggtgcgccggtctcgctgtcgatgttcacgctgatctcaggctgaccctggatctcctgcgtgaaagtggtgtagctcaggccgtagccaaagccataggccacttcgttgtcgtagttccactcggtggaagaagcgtatgcacccacgggagaggctgcattgcccacgccgttgacgcagtccgcatagcgggtctcgtagtaacggtagccggtgtacagaccctcggcctcaatggtgtaagcgcccggggtgaagctcagcagaccgccggaacgggtaatgacgtctgcggtgttggtgtagtacatcttacccatgttctgcatagcgggagcggacatattgtaggtggggtagatgtcgggcagaccgccggaggggctggtgcggccgcagaggatatcggcaatgccgaccatgccgtagcagccggggaagccgatccacaggatggcgtcgatgtcgggatcgttcttcagatcgccgatctcaacggcagttgcgctattgaccagaacgatgaccttatcgctggccttctttgcagtctcgatgatgtcgcgctcgttggtggtcagggccagaggctcgtctgcacccagaccctctgcgatgccgccgggcagatagtccttggactctgcgctgggacggctgatgaccacgatggatgcatcgccgtactgggcaaagctggactcatagttgctgtccacagctgcgatctcggccagagagggctcgcccggatcgtagacctcagcgggagactcgttgttggcgtggttgtaggtctcgttcagcttctcatagatgctgaccatggtggggttgatctcgtaacctgcaccctcgaactcgaactcgtcaccgctccaggaagacacggtacggccgaccgtggtctcgccggtctgacggttggtgttcacactggtggtgatggtgttggcaaagtccgtcttgttctggctcagagcctgctccagattgatgaagccgccccaggccttgacgccgaagctggaaccaaccagaggcacatgagagcggatgcccagcagagtgaccttggagccgcttgccagaggcagagcattgttctcattcttcagcagaacggcgccctctgccgcctgctgacggttcaggttcattgccttctggatgagggcgtgggagttgccggtaccgtcctcgttcaggacttcggcagacggggtgaatttattgtagagcgggtctgcatcggtgctctccgagacaaacttctcgctctgggttccgaggttggtgtcgatggtcgacttataaccttcgagggtcacgcctgtcacgatagacagcgagaaaacgaaggtaagcagtgcagtcagaccgcgcagcaccatacttttcttagccatgctgttctccttttctttttacatcgttcttatcctgccgcaccagacagctgttttccggttctgactcctcctttggattcaatttcttcaaagtgcaaaaccgatgctcagacccagttcgcactcttcgacttggtttttaccagcttgtagctggggttcggggtcgctacgctgcggaagcaggcggtgtcgatgcagtcgcctgcaacggctttcagctccaccttcccgtgcagcggcacgcggaacttgaagatatgttcgccggtctgctctgccagctttttgccgtccgcatacagggcgaccgttttctggttggagtagaccttgacctcgatctccttctcggtgcggtcggtgaaccgcttggagcagatatggacgaagttttcctcgctccaccatgctttatagaggtagaagctgtcctttttggtctttcggtcaaaggtgaccagacccttgtggttcatgcccggctcgccgccctgatcccgggcgtcggctgcaaagtcgaacatattccagacgtgggtcgcccacagccacgggtgacggtcgaagcacttcagcatatactcgtggtacttagcctgatactcctcggtgtggtcgccccggcgggggtgggcactgtggaggttgggcatcccctcggcaccgtactcggaaaagcccagcggacggttggggtataccagatggaaaaagcccatccacaggtcgttcaggaacaagcccggcacataccagcccagatacaggttccagctgacaaggtcggtgatgtgtgccaccgggttgaaggggccgcacatggcgtagcaggccagcgtagtcaggcgggtggggtccatcttgtggcacagctcgttgagcacccggtggttatccagcatatccgccttgtccttggtggagatggtgatctcgttggacacgccccagcagacgatggaggggtggttgtagttctggtggatcagctctttcatctggctgatggtattttcccggccattgggcaggtgctcggaaatataggggatctctgcccagaccaccatgccgtatttgtcgcacaggtcgtagaaatactggtcgtgctggtagtgtgccagacggacggtgtttacacccagctcccggatcagcgccatatcctcatcgtgcatctcccgggtgatggcattgcccagacccttgcggtcctgatggcgggaaacgccgtggagcgggtagggcttgccgttgaggaagaagccttttttcgcatccacagagaagctgcgcagacctaccttggtggtcacttcgtccaccggctggccgtcctgcagcaagcggacaacacaggtgtacaggtaggggtctttgacgccgttccacaggtggggagcatccagatggagagaggtcttttcgccctcgccctttgcaacgatgctgccctcagcgtccagcagctccaccgcaacggtgccctcgccctccaccagcgtttccacctgaatgtcggcgctgccctctttcaggacgggagtgatcttcacaccggtatcgccaaagtgccccagcgcaatgtggttcttgttcaccaccagcaggctcacatcccggtagatgccgccgtagaaggtaaagtctgctttctgggggtaaacatggtcgttgacgctgttatccacccgcaccgtgagctggttttcggcctgcagcagctccgtgacctctgtccggaaggtggagtagccgccgtcatgggtgcagagctgctgaccgttcagcagcacggtgacgctggaattgacgccctcaaactgcagccagacctgctgctgtgccgggtcaaagacaggagctgcaaagtcggtgcggtaggtgcaggtaccccgccagtaatcgttgccgccgtcctgaccgtccacggcattccaagtatggggcagtgctacggcagcggtcacaccgtccgggccggtgaactgccagtccttcataagctttgcaatattacgcatccgattcctcctgttttttgctgtgctccggtaatttttccgtacatttttctttcgttgttattttatcaaagcggccaattttcgcaagatgcccgcgaaaatcggtcgttttgcgtgcgcattcggttttcagcttccaaatgcaaactcctatatttgtatatttttcacaaacagatgtatccaacaagccataaaaagaaagccgccgcagtccttccatttcggaaattctgcagcggctgccggtttcttaccttatttttgcagcggaaagatgatcttttccgcaaagaactcgccctgttcctccaaggtcaaagttcctttatatttctgcacgatgcgccggatcaccttcagctcgtattgtgcggagcggtttgcccgctgttccggcgggcgcagcgggctgatgatattcaccaccacaaagccctgccgcacacagaccagcaggtcgatgacccggcactccgggcgagcggtctgcaccgcgctttccacagcatgatccagtgcattggcaaacagcgcgtacaggttccccgcctcgataaagcccagacagctgccgtttgccacggcattcagctggatgccccgggactcgcacagcaggctcttctcggtcagcaccacatccagcacctcgttgccggtgttgcggttcgcatcataaaggcgggctgcgcgctcggcctcctcgatgcgctcttgcggcaccgcttcgggcgacagcttgcggagattggcaatctgcaccttcagttcgtggcagcgcttattgatcatctgcacgttctgccgggcgacctgatactgctgacgctgccgctcgtacagcagattcagcgcattcatctctttttccatggcagatttcttgaacagctcactttgaaaatacagcagcgtaataaaatagaactgcccgatcaggatggtggcgacaaggctctgcggaaattgttctgcgcggaaattgtccagcaccgccgcctgcaccataaacaggatgccaatgaagaacgagctgagcagctgccgggggccgatataatactctcctttataaggcagctgccgcgccagcaggaggtacaccgccgcaaagaataccgtcccggacagcagctgtaccagaaccgcccaaggggaagccatgttcagcgggtgcccatgcttggcaaaatacagttccagatagcaccagccctcgtaggcgcactgcgcgataagcagactccacaccgcgcagtatatcgccccttttttattgatatccgtgcacaggtagatcatcccacccagcagcgcaaaaaaggaaacataaagtaccagcaacaagagctgctgctgccacagtgttgtggactgcgccagcgggtccagcagctgtgccagtaaaagcagcgggaacagcatcccgcaggcgcgcccccagaagtgggagcgatgccgtaaaggcaggcaaaagaccagcgcagcgccccagcgcagcagcgcccggagcagactgttcagcagggatgtggtcacagcacacctcccatgtaggacgccaccgcagtaagaaaggccgtgcgctgccgccggctgatctccagccggtcgtctttcacaagggcaaagtcgctttcaatgcccttgacgtagaccaggttgaccagatagcactggttgcagcggacaaagtggtactcggcaagttgtttttcggcgctttgcaggctggcgcgcaccgcaaactcccctttggcggtgtggtagtacagcatccggctgtgggtctccagataatagatatccgcagtgtccagcagctggatgccgccgcccgccagctgcagcaccacctgcccgcctctgcgccgctgcacccgctggatggcgcgggagagctttgtgcagaactgataataattcaccggcttcagcacataatccagtgcatccacctcgtacccccggatggcatactgcgccatgttggtcacaaagaccagcaccacctccgcatccaccgcccggatggcttcggcagcaccaaagccgtccagccggggcatctccacatccataaaaataatgtcgaaccccggtgtatagtgctctgcgatctcagagccgtctgcaataaggctgatctccacttgtagtccctgctcctcggcatattgccggacgaaccggttcaggcattcccgtgtttcctcctgatcctccacgatcgcgatcctgaacatcctgcacccaccttccttctgcgtctgagcgccgtatcactctttttattgaaacatacttttcggtgaaatgcaatggaaaacctcattgaatacagtaccgttttaaggcgcgggaaccaggttctaggcggaatcaaattcgcacaaagcgaacttgatcccgcaaaacaaaaggcaggataccatcaccacgatgataccctgcctttgctcgtttctgcttaccgttccaagtaatccttccgcagaacttccgataaacaaaaaacgtacccgaaccccttttcataaagaatcaggttcgagtacgaactgtatggtggacggtacaggactcgaacctgtgacctcctgcacgtcaagcagatgctctaccagctgagctaaccgtccatgtcatatcgacttggatattttaccacagctttttgcaaaaagcaagaccttttgtgctttttatgcgttcttttttacttttccggcgaaagtgcccggcggatgatatcgtacagcaccggcttcatggcgtcgatgttgtccggcttgccctccagaatgctggaatagcacactgacatacacatactgccaagggcggtgatgcgctggtagacctcccgctcactacgtccggccatctccgggctggaaagcacgatggccagcagcttgcgcatcagaggctcggcttccctgctggcttcgatttggtccaacccgggccagacgaagttgcgctccagaaaccgcagcaccagcacatcctgccgcaaagcctcgatgatatggtcgatgacgaacactacctgcgcggtaaagtcgggcagctcggggtgctgctcgaccgcaaggcaggcatcgctcagcagctggtagctcacccgccccagcagcgcctgcatcaccgcgcccttatcctgaaaatacagataaaacgtgcctttgcccacctttgcccggctggtgatatcctccacgctggtcttggcggtgccccgctccagaaacagctcgtaggctgcatccagcagggcgcggcgcttttcctgctttttcccttccacggtgctcatgctctgggtagattcctcttttctctctagtatgaatttggacgcaggtatgtgctgcgtccggtctgcgtaccttagtttagcagtcctttgccgtttgtgcaagcccgatttattatacaatgttttgcaggtgataaaaaaactgactttcagtcactttttctgcttgacacactgcccgggctgaatataatagtgtttgcccggaagatgaccggcggtcagtttcgcgggctttcccaatcaactttctattctggagggttctcatgaaaaagatcgcacaaggcatcgtgcgtctgcgcaagctgatcttaacagtggccgtgctgctgttgatcccttccgcgatcggcgccattgccacccgcatcaattatgacatcctcacctacctgccgcaggatctggactccatgatcggcgaggtagcccttgaggacgatttccatctggcctccaccggtatgatcacggtagagggcctgccaaccaatgaactcatcgccatgaaaaaggagatcgaagccgtgcccggcgtcacccagaccttctggctcagcgatgtgatcgaccccagcatccccaccgccatgctgcctgccgatgtgcagcagttcatgttcggcaaaaacgattccaccatgctgatcgtccgctttgacgcccccagcgccagcgacgagaccatggaagccgtcaagcagattgaaaagctgctgcgcaaggactgcttcttcggcggcatgagcgtcattctgcaggacaccaaggcactggtcaatcaggaaatgcccctgtacatcctgatcgccgtgggcgccagcctgctggtgctgttcctctcgctggaaagcaccatcaccccgctgctgtttatgctgggtctgctgttccccatcgcgtacaacttcggcaccaacatctttttggggcagatcagctacatcaccgaggcgcttgccactgtgctgcagctgggcgttacgatggacttctccatcttcctgctgcaccgctatcaggaagaaaaggagctgcgctccaccaatgaagaggccatggtcagcgccatctgcaaaaccatgacctccatctccgcttccagcctgaccaccattgcaggcttccttgcactgtgcgccatgcgcctgacgctgggccgcgatatcggccttgtcatggcaaagggcgtggcactgggcgtcatctgcaccgtggtcatcctgccctctttgatccttacctttgataagtgggtggaaaaatacaagcatcgcaccgttatcccccggctgaccaagctgagctactttgtttccaagcattccgtgcccatcgtggtcgtctttatcctcatcctcattccctttgccattgcgcagaacaagaccagcgtgtactacaccctgttcgactccctgcctcaggacctgaccggcatcgtgggtaccaacaagctgggcgaggacttcggcatgaccaccagccacttcattctggtgcatgacgatctgaccgctacgcaggtgtccgacctgtgcgatgagctgaaggatgtggacggcatcacgcaggtggtaagtctggactccattaccggtcccggctttgacaccgagctgctgcccgacagcgtgatggagatcctgcagtccggcggctacaagctgattttggccaacagttcctacaagaccggcacggatgccatcaacagccaactggatgagatgatcggcctgatcaaaaacgtagaccccgagggcgtcatcaccggtgaaggtgccatgaccaaagacctgatcgaggttgcagacgtggacttcaagaacgtcaacgtctggtcgatcatggccgtgctggtcatcatcgccatctccttcaagagcatctccatcccggtgctgctggtcgccagcatcgaagccgctatcgccatcaacatgggcatcccgtactttaccggtacgcagctgccctttatcgccagcatcgtcatcggcaccatccagctgggcgctaccgtggactactccatcctgatgaccacccgttatcacgaggagcgcgcctttggccgcacccccaaggaggctgcccagcagtcgctggagcattgcagtcagtccatcctgaccagcggcctgaccttctttgccgctacggtcggcgtggccgccatcagcaagatggagctgctgcggagcatctgcctgctgatctcccgtggcgctctgatcagtatgctggtcattctggtgatgctgcccgccgccctgatgctgtgtgactggctcatccgccacaccaccctgaaatggatgatccctgaatctgccaacgccaagaagtctgaaaaggagtaatgcgttatgaaaaaatcgcttcgtttcgccagtgcggcgctggcagttgcccttgccgccagctgtgcagccccggcttttgccgcaggcggcagcagctttaccaagtctgagaccgtgtacgctgtgatgaacgccgatggctccatccagagcaccactgtcagcgagcacgtttacagcgcctccggtctgtccaaggtgaccgaccagagcaccctgaccaatatccagaacaccgagagcagcgccgagttcacacaggacggcgaaaagctggtgtggaacaccgatgataccgatgtgtattataaaggtgataccgaccgcgccctgcccattcaggctaccgtcacctacgcgctggacggtcaggaagccgcgctggaagatctgatcggcaagagcggtcatctgaccatgaccatcgccctgaagaacaacgagaccggcaccgtgaacgtgaacggcaccgaccgcaccatcgtcaccccgctggtcaccgctgtgggcgtgatcttcgggcaggatgccaccaacgtggtggctgcccacggtctggtggaaagtgccgccaagagcaatgtggctgcctttgtcaccctgccgggcgtgaaggattccctgtccggtctgctgccggacgagctggacaccattgaggactatctgcaggacaccatcacggtggaagcggatgtcaccgggctgacctgcccgcaggtgatgatggcctgcgccaccagcgctgcggctctgggcactgacaatgtgtttgacctgagcagcctcaacgacctgaccgacggcatcaaccagctaaatgacgccatgagccagctgctggacggcgcttctcagctggagaacggtaccagtcagctggccagcggtgtgctggcactgctggacggcgccaacaccctgaacaatggtgcagccgcactggacgagggtctggggcagctgaccaccggtctggacaccctgagctccaacaacagcgccctgaacagcggtgcgcagcaggtggcggacggcgtgctggcttctgccaacaagaccctgaaagagggcggtctgatcgacactgatatgacctgggataactacgccgcggtcatcgacaacattctgaccatcaacgacaagacgctggctgccggacgccgcaagatggtgcgtaccatctgggagcaggctcccagcttcaaggacagccagctggatctggcgctgtacctttccgctaccaagacgaaccatgatctggaggctgctctgcacctgatgcagaactacgacccctccatgctgtgcggtctggtgcagctgctgaccagtcaggaggccaaggacaccgccaaggcagagctgaagtatcaggtagagaacagtcaggatatcgcggatgtgcgcgccctgaaggacagcctttccaagatccagtacttcgtttccagcgtgggtcagtacaccgccggtgtgcagaccgccgcagatggtgcacactctgccaaggacggcagtgcccagcttgccgccggtaccaagaccctgtacgacggcgtgaacaccctgagcgatggcgcaagccagctgaatgacggcacccaccagctgaacgacggcctgaaccagttcaacgaggagggcatctccaagctgaccggcgcactggatcaggatcagctgcacggcctcaagaccgtgctggacgagatgaccgaccggctggaaagctacaccagctttgccggtgcccccgaggacgccgagagcagcgtgaagtttgtctacaagaccgccgagaccgtggccgctgccgacaatgttgtggctgagactgagacggtgaaggagggcaacatcttcacccgcctgtggcagcgcatcgtgaatctgttcaagttctgataacgccaacatccttccagaatcgtatatagatacacaagaagcgccccgcagccgaatggctgcggggcgcttcgatgagcgggctgaggcactgaccaaggcggcggtagagctgactacggcagaggcacccaagtgggagttcatcgcggcacggcttctgaaccactcctttcgctgtcgcaacgcacaggaatgggaggggcgcggcgtctgcgacctctatggcaagcttcgctatctgacggataagggactctacggtgactatatccttgcccactatacccacgaggagattgccatggcggaggactttctctgcccggaacgggacgagctgttcacctactccggccttgacctgctgctcaaacgctatgtgatccagtcacgcagccgcgtgccgctggaaacaccgcaggagatgtttttgggtatcgcgctgcatcttgctatgaacgaaggctctgaccgcatggggtgggtaaaacgcttttacgatatgctcagccgtatggaggtcacaatggcgacacctaccatgtccaacgcacgaaagccctaccatcagctttcaagctgctttgtggacactgtgccggacagatggcgacacctaccatgtccaacgcacgaaagccctaccatcagctttcaagctgctttgtggacactgtgccggacagtctggacggcatctaccgctcgctggacaacttcgcaaaggtctctaaattcggcggtggaatggggatgtacttcggtaaggtgcgcgctgcaggcagcaccatccgcggctttcaaggggcggcgggcggtgttatccgctggatccggctggtcaacgacaccgccgtggcggtggatcagttggggatgcggcagggcgctgtggcggtttacttagacgcatggcaccgggatctgccggaattccttcaactgcgcaccaacaacggcgacgaacgcatgaaggcacatgatgtgtttcccgccgtgtgctatccggatctcttctggcgactggcggaggagaacatagacgcgccgtggcatctcatgtgtccgcatgagatcctcacggtcaagggctacgcactggaggattactggggtacagaatgggagaagcggtatctggactgcgtcaatgacccgcgcatcgaaaagcgcagcgtcaccgtcaaggacatcgtgcggctggtgcttcgctcggcagtggagaccggcacacccttcgctttcaatcgcgacagtgtaaatcatatgaacccaaacggccacacgggaatgatctattgctccaatctctgtacggagatcgcgcagaacatggcacccatcgagcacatcagcactgaggtgcacacggagaacggcgacacaattgtggtgacggccacacgcccaggtgagtttgtggtctgcaatctggcgagtctgtctctcggtaatctgccggtggaggacgaggcctatatggaacgcacggtggaaacggccatccgcgcactggataatgtgatcgacctcaacttctacccgttggaatacgcgcggcttaccaatcagaagtaccgcagcatcggcctgggcgtcagcggctaccaccacatgctggcaaagcgcggcatccactgggagagcgatgagcaccttgccttcaccgacgcagtgttcgagctcatcaactacgccgctgtcaaggcggacacagctctggcacgggaaaagggtcgttacgcgctctttgagggcagcgactggcagacgggcgcgtattttgaaaagcggggttatacctccgaaaagtggcgggcgcttgcgaaaacggtggcggtgcagggaatgcgcaacgcctatctgctggcggtcgcaccgacctccagcacatctatcctctccggcacgtcggcgggcatagatccaattatgaagaaattctttttagaggaaaaaaagggcagcatgctgccccgcgttgctccggagctttctatggacacatggtggtactataaggcagcgcatctgatcgaccaaagctggtcggtacgcgccgcgggccttcgccagagacatattgaccaggcgcagagcatgaatctctatatcaccaacgactattccatgcgtcaggtgctcagactgtatttggaggcgtggagggccggcgtcaagaccatttactatgtccgcagcaaggcccttgaggtcgagggaaaccgtatattgaacaaaacggcagagcgtattataatgaggaaaaagctcaaaaaggagggccgaccacatggcacaggaatatctgcccgcaccatccaacatccgtcttgcggacttgatgaaagaacgcaacatcagccaaccagaacttgccaaggaactcggctgctccaagagcaccatcagccgcttcatcagcggtgcaaagggaaccctgacccatgagcaggtgctgaaaattgcaaggctgttcaacgtgtccacggattttttactgggagaaaccaacatccccgaccgcaagaactacgatattgccgagctgggtctgtccgtagaagccgcaaagaacctctacacagggcgtgtcaaggcagaggtggtcaacctgctgctggaaaacgcccgttttgcagaacttacttaccgcatagcgcagtattttgatgatacttttgcatccggcatcgcagcacagaatgccatgctcacgacattgagcaccctgctgcgcacaaaggtcaagaccccggaagcagccaaagccgcaaaggacatcagccttcggagaaagccggtgtaccaaggcgaccttgatgatattgagacgtacttcatggcaacggtcaaggaaatcaaaaagggtatcgggagccattacgccgagcaggaatccatgagcaagaaagtggccgagaagatgttcaatgaactgaccaaggggcaggatgtgcagcacccaacgattacggcagagcagttgacggatgcaatgttggacagcgtttcgggtatggaaggagccacgccggaagcactggaacagctgcgaagcggtctgttgggaatcttgcagtctgccgcagagcaggaaaacgcccatgaagcagacgaatgaacggctttgtgcgctggcacagaaaggcgatgcaactgcgctggacagcctgatcgacaacaacaagtcctttattggcaaggttggcgaatgacctttttcgcagcatgaatctggcacaggctggcctgaatcttgacacggacgatttgaaacaggcagggaatatgggcttgtggaaggccgtgccaaagttcgatgcagcgcgcggcatgaagttcctgacctatgcggctcctgccatccgcaacgccatgatggacatggtgcgggatgcctttgccgcttttgagcagcggatggtgacggaagacaaggacggcgtctgctaccagcgtatttcgctggacgatgttctgccgggagaagagcagctgcggcgcattgaagccatagccgacccctacgccatgcagccgcagagcattatggaggagcaggaatcgcgccgggaactgtacgatggcctgaaacggctgacccaacgggagcagacctatctgctgtaccgctatggcttcaccgatggcgaggaacatccgctgatcggcacggcgatatactttcacctgacgaaaggccgcgcaaaaaagacagaggaacaagccatggataatttgtggctggaactgccgtggtggtttgtatgaacgaaaagaaaaatcgtgattgtgctacaagttttctggaaatttatgtgcaaccatacgattttgaaaaaattgtggacagatgaaataaatcaggcttgaagttcgttgtttaaacagaaaagttaataattatggtatgataaaatgcgataacaaataaatcgacaaaaatagattgaataaaggagaagaatgctatgaaaaaagtaatttacctgtttgtgctatgcatggttttggggttagctggatgtgggcaatctcaggaaaataaagaatcatcgactgaaagcacttcagtacaagtagaaaacaaaaatgttagtgatatagtatcaaacgagcatttaaccaataatgatactgcgaattttcaaatgccagaggaaggctattatagtaatgattttgatgaaattctgaatatcactaaagaagatgatggcacatataggatcgagtatagcgttacccatttgctttatgtcgaaaacgcgattggaacttacgattctgaaacagggattcttagctttagcggcaaagacgacagaggaaatgatataaaagcagaaattgaaaataagggagatcatctggaagtcacagtaactcagagcaactatgaagatattatcgggacgaagcaggaattttttcaagcagatgagtaagaacaaataggcgacaaaagttgtggaaaaacttgataactattaacaaaccgatagccctctatttgcaatgatcgcaagtagagggctgttggtctgtttggaatattctaattaaaggtcaatcttctaatctgccatggtcgcggccgagcgagagataatgttcaatctcaccacccagtacaagctgggcgtactccaatggcttattgtagagtagccaatccagttctgcccgctgtgccggggtgttgccgtactcgtcctcaatggcgatgcagtcaagggaaaggacagtgccatcctcaaaccgggcttccacccggttggtgtccatattgtagcggcaggaaagtagtttcatcatagtagtgtcctcctagacttgattttgatgtatggccactcaaaccaatgccgtcaagccggtgggggatatggataacctgtggctggaactgccgtggtggtttatctgagtgagatgagcgggctgaggcactgaccaaggcggcggtagagctgactacggcagaggcacccaagtgggagttcatcgcggcgcggcttctgaaccactcctttcgctgtcgcaacgcacaggaatgggaggggcgcggcgtcggcgacctctatggcaagcttcgctatctgacggataagggactctatggtgactatatccttgcccactatacccacgaggaaattgccatggcggaggactttctctgcccggaacgggacgagctattcacctactctggccttgacctgctgctcaaacgctatgtgatccagtcacgcagccgcgtgccgctggaaacaccgcaggagatgtttttgggtatcgcgctgcatcttgctatgaacgaaggctctgatcgcatggggtgggtaaaacgcttttacgatatgctcagccgtatggaggtcacgatggcgacacctaccatgtccaacgcacgaaagccctaccatcagctttcaagctgctttgtggacactgtgccggacagcctcgtataataaaatagtagtatttatagaccgctctccagcggaatgctacaatagtttcagggtgctgtggattggtgaggcgttactaccgcaaagacggtttttgggaggctccaaccacagcttctttgttgaaatgttaatcagttagataccgccagacggtttatttagaacgaggttacaagagcaaagaagtctgtggtcctgaacagcatcgaaataaatacgccggaggtatcaaaatggtttgtgttggaattgacgttgccaaggataagcacgactgctgtattctcgactcggacggaacgattcgtgccgactgcattaccatccccaataacatggatggcttcaagcagctgcttcagacgattcgagactgtaccaaaaagtcagacaaaataaaagtaggacttgaggctaccggacattacagctacaacattcttggatttcttcttgacaatgacctggccgtctatgtcatgaatcctttgcacaccaacctgtaccgaaaaagtctcagccttcgcaaaaccaaaaccgatcgtgtggatgcaagaacgattgcaactatgctattgtccgatgtagacctcaagtcctacacggatacagcataccataacgaagagttaaagtcactaacaagataccgattcgataaggttcgtgaaagagccaagctgaagcagtcagtgtccagactggtcacgattctgtttccagaactggagaagctcgttccctctctccatattgcttcggtttatgcgctcctcagtgaatatcccggtgcaaaacagatttcagaaattcatctcaccaagctgacaaaccttcttgcgacagcatccaagggtcgttatggcaaagataaggctatccagattcgagatgctgccagaacttccattggttccgttatgcctgctaaatttctggaactgaagcataccattaaactcattcgggaactcacctccgagattgatgaaattgaagtttctattcagaaaatcatggatgaactgaatccaccgattctttctattcccggtgtcggtatccagtcagcagccatgattcttgctgaaatcggtgatttttccaactttgaatctcctgacaaaatccttgcttacgctggctgctctccatctacataccagtccggaaaacttacaaactgttacgctcacatggagaagcgtggttctcgttatttgcgatatgccctctacaacgcaaccaagtacgtctgccactggaatcccgtctttgctgaatatcttgccaagaaacgtgctgaaggaaagcactacaatgttgccttatcccatgccacgaagaaacttgtgcggctaatctatgccttgcagaaatctggcaaagcatatcttgtagctgcctgattctctccagagcctgagccaaatccaagaacaacttagctggcacagcgaacccttgacaaaccgaagcattcaaatgctattctgtttctgcgagggttggccgggcttgctttgctattctctccgtcgccctcgctgcattgattatggcatttgaatgctgtttgtcaggggcagcggtcggcagacggattttttcattttggggcttgacttttaatagttagtctcccagacatgaggttacacgggacttccttgcagacaacctgatgaatttagaaaaattaccgaaaacctcttgacgaagtctagcccgaaggtaccggctaccgtgcccgcacccggtttgccaagttcttcaacctcccggaactgatgtccatgttcaaggaggttgcggacattaaaaccagcgaccagcttcatctgccggtacccgaagcaaagtttgaaaccgtggtggcaaagccgtccgagattcagaaagaaatggtgcaggaactgagcaaacgtgccgcaatgatccactccggcgcggtggatgcctctgtggacaatatgctctgcgtcaccaacgatgggcgcaaaatcggcttggatgttcgtttgatgaaccccatgctgcccgatgaccccaacagcaagctgaacgtctgtgtgcagaacgtgttgaagatctgggatgagggcaaagatcagaagctgacacagcttttgttctgcgacctctcgacaccaaagaacgatggcaactttaacgtgtacgatgacattcgcaaaaagctgatctctgccggagtgccggaaaacgagatcgagtttatccacaacgccgacaccgaagcgaaaaaggcggcattgttctccaaagtgcgctctggcgatgtgcgagttttgctcggaagcactgcaaaaatgggagcgggcaccaacgtccagtcccggcttgtggcagtgcatcacttggatgttggctggaagcccagcgacatgacccagcgcaatggtcgcatcatccggcagggcaatatgaataaagaagtcaaggtgttcaactacgtcacggaagggacgttcgactcgtatttatttcagacccttgagaataaacagcgatttatctcgcagattatgaccagcaaatccccggtgcgctcctgcgaagatgtggatgaacaagcactttcttatgcggagatcaaggcactgtgcgccggaaatccgctcatcaaggagaagatggatttggatgtgcaggtcgccaagctgaaggtgctgaaagccgaccaccagagtcagaaattccgcctgcaagacaagctgctgaccaagttcccggctgacattcaggaaacaaatgcctatatcgccggagtgaaatcggatgcggaacttgccgctgcccacccgcaggtgcaagagggtttctgcggcatgaccatcaagggcgtgacctacgatgagaaaaagaccgccggtgagcgtctggtgcttgcctgctccgaactgcccaacgccgaagaaaaagtaatcggcagctaccggggctttgagttgtctctgcggttcgataccttccgcagcgaatatcaggcgattctgaaggggcagcggagatacccggtagcactgggcaccgacccgctgggcaacattatccgtctggacaactccttgaacaatttcccggagcgcattaactctgctgagaatgaactagccactctgcatcagcagcaggcggcagcgcaaatcgaggtggaaaagcccttcccgcaggaggaagaactagcagagaaatctgcacggcttgccgaactgaacgctcagttggatgtggacgaaaagagccacgacccggaacaggatgaggaagaacaggaggacgcacctcgccgcccctcggtgctggcggcactggaggaaaaatccgataagccggagccggtgaagcccttccgcagttattacgacaaggacggtgatgcccggtgaaggaaaagcgggatgaaatcattatcctgagaaccacaaaagctgagaaaagccgcatttatgaaaagatgttgggcatgggcatccgcagcctgagcgcctatatccgaaaaatggctctggatggctactgcctgaatcttgacctgccgcaactgcggcgcatggcgtatcttttgcagatgtgcagcaacaatctgaaccagtacgccaaacgtgccaatgagagcggcaaaatctacgccaccgacatggaggacctgcggcagcggctggatgagctgatcgacattggcagacagatcctttccaaattggcagaactctaaaatttaaccccgcagttggagggctgcggggctacataagggttgacatccttgcaaagcaatcgttgatacctttataatcggggtgaaagaaaggcgggtgctagatatgaggttcgtttttaagatgatcgtttttccgttttggctgattactgctttccttgcgctgatgctgaaatggacactgaacctgtcggcgtttgtgctggcgctgcccatgctgtatattttcggctgcggtctttatacgctgtactgccgggagtggatgcagtttttgatcttgctggtggcggagtttggatgcttcctgctcatcaccgccggaacagtcattgtagaatccgtggaatggttcagtggttggattgctgaattataaaatttttatgccgccattgtgcggcattttctttttgctgggaggtggtagaactggctgcaacacgtttgattgcgctgcacaagaacaagggcaagtcggttgcggcctgcctgaaaagccgcacggactatgcgcagaatcccgacaaaacgaacaagggagagttggtcagcagctatgagtgcagtcccctgaccgtggatgaagaatttatgctttccaaacgccagtatgaactgatgactgggcgcagacaaaaaaatgatgtgattgcttatcagattcgacagtccttcaagcccggtgagatcaccgcagaggaagctaataaggtgggctatgaactggccatgcggtttacaaaaggcaagtatgcgtttattgtcgcaacgcatactgaccgggaacacattcacaatcatattatttacaactccactgcgctggacagcacccggaaattccgtgattttctattgtccgggctggctgtgcaacggttgagcgatttgatttgtctggaacatcagctgtctgttattgaaatcaagccgtaccgagagcgacagaagcgcaccctttatccacccaaagaaagcaatcgtgacaagctgtgttctgtaatcgacggcatccttctggacgaaaaaactgcaaattttgaagcctttcttcaaaagctggaacagcagggctatgaaatcaaacgaggaaagcatacttcggtcaaaggcgcacggcagaaacgctttatccgttttcggacactaggcgcaggatacagcgaagatgagatcaaggcggtcattgccggagaagccgaacaccgcccgcatcagaagcagccaccgaaagagcaaccgttccacctgttggtggacattcaggcaaagctctccgagggcaaaagcgaaggctacgcacggtgggcaaaacgttataatctgaaagagatgtccaagaccctgatttttttgcaggaaaatagaatcggcagcatcgaagaaatgcaggagcgtgtggatgccactactgccagttatcatgaactgggcgattccattaaagcgtctgagaagcggttggcagaaattgcggtgctgaaagcgcacatcatcaactacgccaaaactcgaccagtctacgatgcctaccgaaactcagggtacagtaaaaaatttttggaagcccaccgggagcagattacactgcacaaggctgcaaaagccgcttttgacgaaacgagtttgaaaaagttgccaaaggtaaaagaactggatgccgaatacgctgcactgctttcgcagaagaaagcaacatatccagcctatcgtaaggcacgggatgaaatgcaggaattgaaaaaagcgcagaagaatgtggatctgttcttcgccgaggaaaaagaccccaaggaaaaatcgcagacccgctaaacagaaaacaccgaggattcttcccatttgagggagagtcctcggtgttctttttcgttataggagcatttggcacaaatgcgcagcctgcatccggcggatgcagtacacaaatggtttgggactatcccaacaagcattttgcaacgcaaaaatggcgtttgtatatacgaacgccctgcttgcgacatagatgttcccgttaactactgcgtcagaaattttcagatcacttcaactttgcgaggatatcgtctgcgctcataccactggccaacagctttttcagcacgtcctctgcttcggctttctttgccgattccgctgctttggtttcagctttgatctttttagcctcgattcgggcaatttccttgtcgatagatttcagctctgctttcttggttttcaggtcagctttcagcgcatcgatgttcgcagtgatggatgcaatttcggcggcagcgacttcctttgcggactgcttttcggcgagctgtgcagcaaagtcaacggttgcttttacagtcttgggcttgttcttgcttcctttgggacggggcataggggacacctccaatgttttttgatggcttcagtataacactcgtcttttatgttcgcaagaggtgtattttgtagaatgaaaatatatctttatttaaacaatagatcgattcaaattgtgcaaccattcaggaattgcactgtaatctcttacccacagaatgttaattccgatgcgataaaaatgattttcaatttgaagccggtcttttgttgtgaactgttttggcaccacagcaccagatgcatcggtacttttgtacatcctaggtaaaatagcataatgcttcggtggattatacgctgtgatttccaaaagccttcggatattgggatcacttaaactgcatccaataaacaaacatatattttctctgaagaaagaaagctgacttgcaatcggccaactataaggctgattataaagcatattatagtcagcttctgtcagacagattgatcttatgtggagtgtatccaattgactttttgttgcaacttttggtaaaaatccgtgcacatgatagagccgtaaactttgatttggttgtccattcacgccataaaaatccgcactcgcctgaccatttgagtatctaaccttcgttgtgaacatggaacaacactttactccacgccactctaaatactgttcaaggaagtcatcgtaattataggttaaaatcctgaaattttgatctttccgacatttttgagccagctgcgcaatctcccctaactcggtattcacatccaactctctcgctttatcatataagctttgatggatttgccaagcaaaggttttctcatctgcccagacatctttgcataactgagctgttgtaagactcgtcccgccaacttcctgaaaaaccgcctcggaatcatccaaaagatgttgcctttcaatttctgtctgaaactctctcagcaattcatcccaagtttttgctccctgttccttcgaaacacccgcacccagcacaattgcaacgccctttttctcttcgatgcaggtacgtattgcatttgtataaatatcattgtttttttgatataagtcatctctgtacagattttcggaaatttgaaacttttctttgtcttgtgtagttcttttacggtcaatattccatgaacacacatgaccatactcagctggatactctttaatccatttgtttatctcattgatatcccatactgtaaggtctaattcttcagcagatgttctggcgtttacaatgaagatagtttccgcctcataattttttctataatcatccgcgattgtttggattcgtttttccagctgttttgatttgctatctataaattcgaaaatcacaggctcttgatatctgaaaaatccatctggcgcaaacgcatcaaatcttcttgcagattctgcaagcttgctatttccagatactctgtactcaaaataaagtggcttgttttcttccaatgattttttcttcagcactgctttaacaaatgatatgaattcatcccttgataattttccattctgctctttcatgaaatccaccagttttttcgcttatatagaccgttagacgccactgcctatccttacgattgaattaagtaatctatcatcaggcttgcactgctgtaattaattcctgtacagaattttaaactccgtagcccttgttcttgatgacctccacgacctgagagacgtacttctggcaggtatcatggtcaggggcttctaccatcacacggacaacaggttccgtaccggactcgcggacaaggatacgaccggtatcgcccagcgcttcggctacggccttgactgcctcctgcaccgccgggtcgttctgtgcggcctttttatcagtgacacgaacgttctccagaacctgcgggtagatcttcaggggctcagccagcttgctcataggcatcttcttcgccagcataacttccatcatcttcaggctggtcaggataccatcaccggtgctggcgtacttggagaaaatgatatgaccgctctgctcaccaccgatacggcagccattttttgccatgtactcgtaaacgtacttatcgcccacggcggtcttagcgtaaccaatgccctgctcgtcaaaggccttatacaggccaaagttggacatgaccgtggtgaccacggtgttgttcatcagttcgccgtgctccttcatgtagcagccgtagatgtacaggatatggtcaccggtgacgacattgcccttctcgtccacacacaggcagcggtcggcatcaccatcaaaggcaaagccaacatccagaccgttctccaccacgaacttctgcaggccctcaatatgagtagagccagcgttgttgttgatgttcagaccgttcggcttgttgttaatgacgtaggtatctgcgcccagagcatcaaaaacagacttagcgatattccagcttgcaccgttggcgcaatccagaccaaccttcacgcccttgaaggaatagatacccagagagatcagatagcccatataacggttacggcctgccacatagtccaccgtgcagccgatgtgttcacggtgcgcaaagggcagctccggccattccttatcgaatacatggagtttgccgtcgatgtaatcttccaccaaaagcagggtctcctcgggcatcttctcaccgtagcagtcgatcagcttgatgccgttatcataatacgggttgtgactggcagagatcatgatgccgcagtcaaagtcgtccacgcgggcaatataagccacggagggcgtagtggtaacgtgcagcaggtaggcatctgcgccagaggcggtcagacctgcaaccagactgtactcgaacatataggagctgcggcgggtgtccttgccgataacgatacgggcgggctcattgttgccgttgcgctcgcgcagagcgttataataccagcccagaaaacggccaaccttgtaggcgtggtcggcagtcagatcaataccagcttcaccacggaagccatcggttccaaaatactttcccattatgtaattgtttcctcatccaaagagcgatttaacgaatatatgctttagccggattataatccgttgcctgctgctcaccacggagaggtagcatatttgagcagcacagccatgtgaaagaacacatggtctcatgtctattctgtggcagtattaattaaaccgtttttctgcctctttagcgatttctgtcttgtctccaccttctctgcagcttccttgttttctgcactgacagagatatagtttttcagcttcgactcggtatcggaggagcgcaccacaagagaaccgttatcttccagcagggacttgagcacgtcagacttcggcagaccatccagacccggagcgtaatccagcagcttaacgaccttcttgccgccgaacaccttgatggcgccacggaatgcctgcataatgttctgcatcttggcaaaaccggcgctgccgtcaaactcataattgtgcagattgttcaggcaatatccgtaagccttgtacaactcgtccagcaggctgatgcccttggtcgcatagtagctgaacatctcacagatcatgtacgcaccgtctacgccgtctttgttacggacgtaggagccggtcaggtaaccacagctttcctcatagctgtctttcttgccctgcttttccaacttaccgatctgctcgcccatatccatggtgacgatcgtcttgaccatgaccgggtcaacaggcatcttgccgtgcttcacacgctgactgcaattataatccagcagcatgccggtctggttgccggtcagcagttcgtactccactgccttattcttgacggcgatgcccacacggtcacagtcagggtcagtcgccagcagcaggtcagcgttgcacaccttagcatatccaacatttgaaacatcatatgtctttactgcgtcaagaatccgcaatgccagaagcgtctccactcattcgtcagttaaataccatacatgagatagtcaaaaacgctaaccgtcaaaatttcagtcatattcttttcctcaatcagtccatcatgcccgtattataccactgaatcatacgctcataatcgtcctgcgtatccagatctcttatgcgcatcggaactgcctttagaggaagaagtggttgcagcatctcatcaattccttgtgcccctgcaatcaaccggctcgataaaactttggaaaggcacccccattcatacttacttgggctacgtaagaattcgtttacttcattatttgaaacagccaagtaaattggttcacttgagtgtgcttcacatacacttatacattcctgtggctcactcataaatcgattgaaatcgtccctattaataagtaaatcgccatccataattacgacgtattttcgcgctccaattaatgtcttagataagctcacccctgagcctgtcttacgataatcattattaaaagcaaacattacatccttacggatatgctttacctccttgataaccttttctgcttgataaccaacggcaacgcgaatatcatcatactcatcgagcatttccagctgacgctgtataatagacttaccagctattttcaccagtgcctttgttgtcccaataccaagtctagtgcccattcctgcacaacagattacaacgctaatatcatcgtgtctcataatcatgtttccttctaatctttttatagaagcgtcctgagaaaatccgcgcacctattatcatcgtaaaatgcataatcaatattctgaatcagcgatggcgcaatatccctaataccaccaaaaccaactgaaatattagcaacttgtgccataccagaatcattatctccatcaccaataacaacaagcggctgaacaaactgttttgcagtcaattccttatcaataacactgactacttgcgtaattttatcgtttttatagtttgctctggagcaatacacatgatcattgaggccgagtttgcgcatcaaatcattaatccaaatatctagatttccagttacaacgtagcacctatcacgattttcccttataaactgtgcgatattctcatttaagggtatctcagctaccatcgctcgcgtttctgatacattcataacgcttaatatttctaccctttttaggaaactactcttaaatggaatctctccattcatggtcgcttccgtaagttctcgcatttctttttgtctatttaccttttctgcaatagtaggtaaaatttctttgcgtgtgattgtcgaatccaaatcaaacaaaaatatatactcagacatcttttttaatcctattctcagaactcagcatttcatttaatgtctccgtcaatttttggataaacatatcattatccgcttcatttctgatggcgattcttaaatattgtttctttcccttgattttcttacttagagtcttaataaagaccttcttttcaagcagcattttctgttttaattcttctgcatccaaaccgtcaagcaattctaccataagatagtttgcttgagatggtatcacacgtatatatcttaggttttgaagttttgatataaatctagttctttcttttctgaatttatctagcgactttatatatgaatcacgatacttaccgcaaatctgcatatagaattcagcaaacgaatttatattccagattgatacatccactttcatttttgaaatcaatcttttatctccgcttgccaagacaccaagtctcagtcccggcacaccgtacgatttagaaatactcttaatcacgtatagatttggatattgatttaaaatttcttgatcaatcaaagatgcgtttatctcatcagaaaaatcaacaaatgattcatcaataattatcttaatacccttatctcttgcccacgatatcatcctcagcatatcgttcttaggaatatagttacctgatggattatccggattaaccaatacaagattagaaatagtagttttatcaaagtattctataagatcactcgcactataggaaaaatcttctgattctaccagataattaaccgtttcaatctcagtatatctgttgggatattcatcaaatgtaggtcgaacgaatccagttttcccttttataaatcccatcattgacttaattaactctgcagcaccgtttcccacaataatactttctggagaaaccccaaatgcgctcgccgccagttccgcattcactctcattcctgacggatattgttcaagcaaaactttaaaattattctgcagctcctcaactagttcacgtggcggataatatggtgtcacaagataaaaataatccagataatcaggatatctccaatatccgccccaacttcccagcattttatcagcaacactttttttatcttttgaaaaaaggattgtagcctgatttatgtcctccgtattattgatttcacgccatacagcattgctcacacgcaaggccttaatcctcgtgtcatttgacattgcaattacattcaacggttcagaatattctagactatctccttgcacatcaattatggtttccaataccggaacaaaatatttttttgtaaaattcatatcaaatttgcaaatcccaaccatccgatacgaatttaactgaagagtcgaagccatttgaggttcttgtccaactgacaaaacgcgatcatttccgtcaacaaatactggttttcctgtcatccaatttttataaatatctactgatacaacacattcaccatccgtttcaagtatagattcgagaagattatcttccagcacaagctgagaatttagaataaccgtatcgtccattgacaaatattctcttcccaagaatatcgagtaaatactctttgactctttgtaaaacttattttctaaaaacacaagttcagtctttaagtttaatctcttgctgaattcaattagactttctttattatccctagtaatgagaattattcttgaaacaatactattatctagctgagtcaacattctttctattattggaactccatcgatctcaaccatccatggttcattgctatttcccaatccagtcagtcctattatctctcgatccgctaaaatgagtgcctgcattatgatttccttctctcccttttaatttcaatctaaaacagacgactatcagaagcacaaatttcttctccgtgaaacctagtaatcagtacttcctccacaccatcttattgaccacattcacatagccctgaatgatgcgaaccaccttcatggacacggtctcgtccacataatcagggcagggcttgcccaggacgcccttcttcttcatttcaatcgccatatcggtggcgttgagcagttcccgggtagtgatgccagctaggatgaaatcaccggcttccagcgcctcagggcgttccgtactggtgcggatgcacacggcggcgatggggtgaccgatggacagatagaagctgctctcctctggcagagtgccggagtcggagacgattgccagagcgttcatttgcagcttgttatagtcgttaaagcccagcggctcgttgacccggacacgagggtccagctggaagccgctctgttccagacggtgcttgctgcgaggatggcaggagtagagaatgggcatatcgtacttttctgccagtgcgttgatagcggtgaacaggctcaggaagttcttttcagagtcgatgttctcctcacggtgagcagacagcagaatgtacttgtccttctccagtcccagacgctccagcacgtcgcttttctggatcttctccagattcatgtgcaggacttccgccatgggagagccggtctggtaggtgcgttccttgggcagtccggtgtccgccagatacttccgggcaaactcggaatagcacatattcacgtcagaaatcacatccacgatgcggcgattagtctcctcaggcaggcactcatccttgcagcggttgccggcctccatgtgaaacagaggaatgtgcagtcgcttcgcagagatggcagacaggcaggagttggtatcgcccagcaccagatagccctccggctgcaattcgctgagcagctcatagctacgtcccagaatgttaccgcaggtcacacccagattctcgccaaccacaggcacaagaatgtccgggccatattccccgaaggtgttcttcagttcgaaatcctcccaaaacacggtggaaaggtttctgtcccagttctgattgtagtagaccacgcagcagtcaaagtattcccggcaacgcttgataaccgcagccagtcggataatctccggacgggtaccgcaaccaatcatgaccttggtgcgcccatcatttttccatgtaaaattgtgttccataaaaatctcctaacgtcaaccagcagcttctctcacaccggctcgaagaaggtgtccgggtggttcgggttgaagatttcgttgcaggtcatcactgtcaccagattctctgtttcagacagattgatgatattgtgagtccagccgggaatcatgtggacagcctcgatcttatccccggaaacctcaaactccaccgtttccccggtgttgatattccgttcctgaatcaagccgtgaccggcgaccacaatgaacagctcccacttggagttgtgccagtgctgccccttggtgattccgggacggctgatgttgatgctcacctgcccgcaatcggcggtgtgtaccagctcggtaaaggaaccacggttgtccacgttcatcttaagggcgtacttaaacttgtccgtgggaagataggtcaggtacagggagtacagtttcttagcaaaggagccatctggcatcttgggcatcatgagcgtagtcggctgtgtcttgaactcctgcagcagatccacaatttcccccagcgtaaccttgtgggtcacgggaacgcagcagtagcgaccgtctgctttcagaacagtctccacaccgtcaaattcacagtgctgctccttgccttccagcaggtcaaacattccctctaccaaatcgtcgatgtacagcagttccaactcggtactgcggtcgttgacagtgaagggctcgtcattggcgaccgcccagcagaaggtgctgacggcactattgtacttggggcggctgtgacccatcaggttgacgaagcggtagactgcaacctttgcccccgtctcctgagcatactggaagaacagttcctcgccagcctttttgctgcggccgtactcgctgttgccaaaccgacctgccagcgtggcctgaatggaagaggacaacatgatggttgccttattgttgtgctttttcaggcaattcagcaggtcggatgcaaagccgaaattgcccttcatgaagtcttccgggttttccgggcgattcacaccagccagattgaatacaaagtctgctttccggcagtacccgtccagctcttctggggtagaattcaggtcatactcgtagatttcttcaatattcagcgccgggcgggtcttatttttcccatctcggatgtttttcaggttgttgcacagggcggttcccaccatgcccttggcacctccttatcctccgtcaccatccgctgttcaaaagtggcaaaggcatcccgtaccatgtccatcatggcgttgcgaatggcaggagccgcataggtcaggaacttcatgccgcgcgccgcatcaaatttcggcacggctttccataagcccagattccccgcctgtttcaaatcgtccgtgtcaaggggtgccgcacttgccacagaacagcttagtggtcagcagatagctcacatcctcttttgcaggccgaccgtgggcgatcctgttctgctcgaaacgctgctgcacccggtcgaacaaatcctggtcaacaatagccggaatgccgcccggcgtcacaatgtccttgtagcggtattcgccgatgtagcggcggttgcggaagatctggaagaagctgttctttacgaacggcttcccggtgcgggtacgcaggccgcgctcattcagggatgctgcaatcttctcagccggttcgccgtcggcgtaccgggtgaagatctcctgcacgatgggagccgtttccgggtcgatatggtacagcctgtcctccttgccgatggtgaagcccagcggcaccacaccgccgttgtacttgcactggagggcattttcgcgctcaccgcgcgccactttcagggcgagttcggcggaatagtattccgccatgccaatcagcatactctccaccataatgccttcaggcccctgcgagatgggttccatgacagacaccagatggacaccgttcttttccagctggtacttgtagttcacggcatcgaatcggttccgggcaaagcggtccagcttccagaccagaactacgtcgaagattttctttccgctgtccttgatcatccgctgaaagtctgggcggtcatccgttttggcagagtaggcacggtcgatataggtgccgaccacggtgataccgttcttctcggcgtagtccttgcagtcgcgcagctgcccctcaatggacgcttcacgctggctgtcggatgaatagcgggcgtagatcacggcggtcatggttgcacctccttggcgcgtattcgacttgcctttatagtatcgggtcaagcgcagcttgtcaacaatctgcgagcagattgaaatgtgaaaattgcgaaacgcagcgaaaaaggggagagcaagaatcgtcccgtggccacaaattttcaattcttgaaaattcttgccactttgggacagcttcttgttggggcgtgcctgccccaaaccctgctggaacgagtacggcaaactggaatttatagtcctctcaaaaccaatttgctttttcttctcgaaatacgggaatatcactatctcgatatggattgtaattatgaagattgcaaccaaactcttttaatgattttattttgttatcctgtgtccatacaattaaagatattccgtcaaattcttcaacatttccattattcattttgcttttaaaataccactccacgattgtttgattgccttgatgaaaaaattgcttaatctcccagacaagaacacttccgcgtgtattccattcgtcaaaccagtgctttaccgttttgcggttttcatatttaggactccaactctcagtatatacaacatcatctgtaaaaatattgtcaattcctaaatctgctttcttaatccacatatcaaaccataatcggataattttttctctctcgttcataaagtacctccataacttccgatttactgggctaagccgagtataccacactccaccatgaaagaacaccccgatatagtgaaattttgccatttttctgcgtacgtgcgtacacgatccgcagggattctaaggggcttgaccccttagcacacggactttgggacaaagtctagtgtgttacaccttgccagaggtgtacacgctctcccggtacgcacgtacgcagcgattgcccccaatgcgtcatatagggtgacgaccaagttcgcacaaagcgaacttgattccgcaaaacaaaaggcaggataccactatcatagtgataccctgcctttgctcgtttaccgttccgagtagtccttccgcagaacctccgataaacaaaaaacgtacccgaaccctttttcgtaaagaatcgggttcgagtacgaactgtatggtggacggtacaggactcgaacctgtgacctcctgcacgtcaagcagatgctctaccagctgagctaaccgtccatattctgttttgccgaaatcagctagattataataccatatctgatgccataaagcaaggacttttttcaaaaattgtaaaacttttttgaaaaagcatcccaaaacccggcttctgtgcggtgcagcgcgggttttgaggcggcgagcgacagctttcttgttgcccccaaccagacgttgtgctataatagaaaactataataggagtagtgtcggaaagggaacacagcatgagagttttgggcatcgaccccggttacgccatcgtgggctggggcgtggtggagtatgcgggcaaccgctttgcgccggtggatttcagcgcggtgtgcacggacgcgggcgtaccgtttgagcggcggctggacgaggtgtataccggcatcaaggaggtcatcgaacgcacaaagcccgaggtgctggccatcgaaaagctgttctaccagcacaaccagaccactgtcatcggcgtggccgaggcgcgcggggtcattctgttggcggcggcgcaggcggggctgcccatctacgagtacacccccatgcaggtcaagcaggcggtcaccggctacggcaaggccgtcaaaaagcaggtgcaggagatgacccgggtgctgctgcatctgcccgccgtgccaaagccggacgataccgccgatgcgctggctatggccattaccttctgtcacaccaacggcaaccagctcaaccgctatacccgccgggtggcgggaccgatttaaccgataaaaagctccccctgagaggaaagacttcccccgcgccgggggaagatgtcgcgcagcgacaaaagggggaatctggcaatgccgtaaggcattgactgagagggttttattcaaatgatctactgtctgactggaaaaatcgtgaaaaaaagcctgaacgccgtggtgctcagctgcggcggcgtgggctactatacccagtgcccggccagtgtggcgggggcactgcccggtgtggggcaggagaccaccctgtacaccgtgatgagcgtgaccgagaacgatgtaagcctgtacggctttgccaccgaagagcagcaggcctgctttgagatgctgaccgccgtgtccggcgttggccccaaggtggggctggctatcctcagcgtcatggagccgcagcgggtggcgctggccatctcggcaggggaccacaaggcctttaaggctgcttccggcgtggggccgaagctggcgcagcgcatcgtgctggaactgaaggataaggtggccaagggctttgtggacggcatctcgctggaggatgtggcgggcactgccgccgatacgcccgcgacccagagcagcgcacaggccattgcagcgctggtgtcgctgggctacagccagagcgaggcggcgctggccatcgcaaagatcgatgccacgctgccggtggaagagatcatcaagctggccttgcgtagcatggcaggcaggaggtaagcaatgcaggacgataccgcgctgtacggcgcaaaaatgatgcagcccgtcatgaccccggcggacaatgaggaaaataacctccgcccgcagcatctggaggactacatcgggcaggaaaaggccaagcagaaccttaaaatttatctggaagccgccaagcgccggggcgagccggtggatcacattctgctctacggcccgccgggtctgggcaagactacgctggcgggcatcattgccaacgagatgggggtgcagatccgcatcaccagcggcccggccattgaaaagcccggcgaccttgccgccctgctgaccaacctgcaggagggcgatgtgctgttcatcgacgagattcaccgcctgtcccggcaggtggaggaggtgctgtaccccgcgctggaggactacgcgctggatatcatgatcggcaagggccccagcgcccagagcatccgcatcaacctgccccggttcacgctggtgggcgccaccacccgcgccggacagatcaccggccctctgcgcgaccgcttcggcgtgctgctcaagctggagttgtacagcccggacgagctttcccgcatcatcatgcggtcggcgggcattctggatcagcccatcaccccggagggcgcttacgaactggcaaagtgcagccgcggcaccccccgcgtggcgaaccgctttttgaagcgcatccgcgactttgccaccgtgctgggtgacggcatcatcgatcgggacgtggcgctgctgggtctgaagcggatggacgtggacgcgctgggtctggatgagctggaccgcagcctgctgcgcgccatcattgagatgtacaacggcggcccggtaggtctggaaacgctggccgccgcgctgggcgaggaggccgtcacgctggaggatctgtgcgagccgtatctgatgcaaatgggctttttgacccgcaccccgcgcggacgctgcgccacccgccttgcctacgagcatctgggcatgaaagccccggagaccggcagcgccgaggaaaacggccagcagagcctgttctgacttattatataggaatttgaagcagtaaacggaaggaggacgctatgcgccctgcagatacttggaaagactacgagctgctggatgccaccgacggcaaccggctggaacgctggggagagactctgctcatccgccccgacccgcaggtggtgtggaagacccccaagcaaagccccctgtgggcaaaggcagatgccatctaccaccgctccaatcagggcggcggcgagtgggagtaccgtcgccgtctgccggaaaagtggaagatcagctgcggcgagggggaggataagctcaccctcatcgtcagccccaccggcttcaagcacaccggcgtgttcccggagcaggcggtcaactgggcatggtaccaacagaagatccgcgccgcgaaccgcccggtgaaggtgctgaacctcttcggctacaccggcggcgctacgctggcctgtgccgctgccggtgccaccgtctgccatgtggacgcctccaagggcatcgtggcatggggcaaggacaacgccgtggcaagcggcctgaccgacaagcccatccgctggctggtggacgactgcgccaagtttgtggcgcgggaaaagcgccggggcaacacctacgatggcatcatcatggacccgcccagctacgggcgcggccccggcggcgagatctggaagctggaggattgcatctatgacctcatcagccagtgcgaagaggtgctcagcgataccccgctgttctttgcggtcaacagctacaccaccggcctgtctccggcagtcatggagtatatgctcaagaccacgctggtgccccgttttggcggcaagaccagctgcgatgagatcggcctgccggtgtctgccaccggcggcgtggtgccctgcggcgccaccgcgatttgggaagaataaaaataaaatactatctcagtcacggcgacagccgtgactgagatagatatatgctaagaatggggtacagcccctttcggaggggcgcaccaccagaaagagaaacaaagcatgagtgaaacgattttaactgctgaaaatttgaagttccgctacgatgccgagcagccggtctacgcgctggacggcgtatctgcgcaggtgaagcgcggggagttcgtggcggtactgggtgcaaacggctgtggtaaatccacgctggcgaagcacttcaacgccattttgctgccggagagcggcaaggtgtatgtggagggcatggacaccgcagacgaagagaagctctacgatatccgccagaccgtgggcatggtgttccagaacccggacaaccagatcgtggcgactgtggtggaagaggacgtggcttttgcgctggaaaacctcggcgtgccgcaggacgagatgcgccgccgggtggatgactccatgaagatggccggcatctacgaataccgcgagcgcgcaccccacaacctttccggcggtcagaagcagcgcgtggccatcgccggtgtggttgccatgcgcccggactgtctgatcttggacgaagccaccgccatgctggacccgcgcggccgcgagcaggtgatgcagaccatccactacctgaacaggaacatgggcatcacggtggtgtccatcacccactatatggaagaggccgcacaggccgaccgtgtactggtgatgagtaagggtcatgtggtgatggagggcaccccgaaagaggtgttcagccagaccgagaaggtgcgcagtctgcacttggacgtgccgcaggccgctgagctgcgggacgagctggtgaaggccggcatcccgatgccggagggcatcatcgacaccggtgcctgcgcacaggcgctgtatgaactgctgcagtaaggggggcggacgaaatggcagatatcattaaggtagaacatctgagctacgtctataaccccggcctgcccaccgcagtgaccgcgctggacgacgtgagctttaccgtagaagagggcgattttgtgggcatcatcggggccaccggctccggcaaaagcaccctcatcacccacatgaacggcctgaacaagcccaccagcggcaaaatttatatcgacggccgcgacctgtgggcagacccggaaaagatccgggatttccgcttcctcaccgggcttgtgttccagtacccggaataccagctgtttgaggagaactgctacaaggacatcgcctttggccccaagaacatggggctggacgaggccgaggtagaccgccgcgtccacgaagccgcagactttgtgggcttggacccggcgcttttggagcgcagcccctttgaactgtccggcggtcagaagcgccgggtggcggtggccggcgtcatggccatgaagccccgcatccttgtgctggacgagcccgccgccggtcttgacccggagggacgggacgatatcctttccgaggtgaaggagtaccacaaaaagaccggtaccaccgtgctgctggtgtcccacagcatggaggatatcgccaagtacgccaaccgcgtgctggtgatgagcaacaagaaaattgccatgtatgacacggtggaaaaggtctttgcccgtgctccggaactgctggagctggggctgtcggtgccgcaggtgactaaaattttcctcaagctgcgggagatgggggtggacgtcccggcggacgtgtacaccattccctacgcggtcaagaccctgctggaagccaagcgccgccgcgatgccggggaaagccttgtgctgccccgcagcgctgcccggaaagggggtgctgtctgatgctgcgagatatcaccatcggccagcacttcccgggcaacagtctggtgcaccggttcgaccccagactgaagcttgtgctgacggtcgcttatatcgtgctgctgtttgcagcctccaaccccttggggcttactttgtccatcctctttttgggggttatgtacaaggtggcaaaaatcccggtcaaaatgatcggcaaaagcctgaagcccattctgcccatcgtgctgttcacggcggtgctgaacctcttctttgtctccggcgagggcgacccgctggtgcatttctggtttttgaccatctacgccgagggcgtgcgctacgcggtgctgatggcggtgcgcgtgatggcgctcatcgcgggcaccagcctgcttacctacaccaccagccccatcgtgctgaccgatgccattgagcagctgctcaagcccttgggcaagctgcacttcccggtgcacgagctggcgatgatgatgagcattgcgctgcgctttatccctaccctcatcgaggagacggataagatcatgaacgcgcagaaggcgcgcggcgcgcagctggacaccggcaagatgaccgaccgggtcaaggcgctggtgccggtgctcatcccgctgttcatctcggccttccgccgcgcggacgagctggctatggccatggagtgccgctgctaccgcggcggcacagggcgcacccgcctgaaggtgctgcgctgcgaaaagcaggactacatcgaccttgcggtctgcatcgcctgctttgccgtcatccttgcctcccggctggtgttcccgaattattaaagaggagaaccctctcagtcaaggccggatggccttgacagctcccccgaaagggggagcttttggtacggaacttttctgatgagagaaaatgccgcttcccgctgcggcccctccggtgaaagtgtgtctgtcgcggtccgcagaccgcgacagacacgaaataaaaaacttttttccgctgaatatggccacagcgaagcggaggccattttaaatcagaactatgaactttttacttacccttgcctacgacggcacaaattactgcggctttcaggtgcagcccaacaggcgcagcgtggcggccacctttcaggatgcactggaagcggtgctgggctcacggcccgatatcaagggctgcagccgcaccgatgccggggtgcacgcgctgggcttccggctgaatttccacgccgacacccgcatcccgccacaaaagctgccgctggcgctcaaccagcatctgccgccggatatccgggtgcttgcggcgcagaccgtgccggaggacttccacgcccggtacgccgcccataccaagacctacctgtaccgcatccataataaccccatcgactcgccctttgacgccgcctactacacccgcgtgccccggcggctggacgaagccgccatgcaggcggcggcgcagcagtttgtgggcacccacgattttctggccctgtgcgcggcgggctcttctgctgccgcccacggggacaccgtgcgcaccatcacggactgccacgttacccggcgcggggacgaggtggacattgaggtgaccgccgacggctacctgtacaatatggtgcgcattctggcgggtactttgtgcgaggtgggcgcggggcggctgcgcgctgccgacatccccgccattctggcaagccgggaccgcagccgggcgggtcccactctgcccgcaaagggcttgtttttaaagtgtgtggattacccggaaaggaaggaagagcagccatgaaaaagcttcatcgcggcggcagcaacccggacggagaaccgctttctgccggacgggtggaatatctggaggcagcgcgtcagcgggtgcgccgccgccgtctgcgccgcaccgccatcattctggcggcgctgatactggtcactctgtttgccaccggtgcggtgggggcatccatcgcccgggtaaaggacatggtggatacggtgcacatcgctctgtccccggcggtgggctggccgcagcagaccggccttggcgagctgacggccgtgcagcccatgtccggcagctttgtggccatggacgaggatgcctgcgcggtgtacagcttaggcggtacccgccttgccagcatccagagcggctacgcccgcccggcgctggctgcgggcaagacccgctttgtgctgtacaaccgctccggcaacgagctgcgggtggaaagccgcacccagaacctgtacagcaaaacgctggaaaacagcatctatctgtgcgccatgtcggacaccggcacgctggcggtggccaccgattccgccgacagcaccgcccggctgaccgtgtacacctccaccatgagcgaacagctgcactgggatatgaccggtacgcagggcaccccggtgcggatggcctttgccgccgacagccgccgtctggcggtggcggcggtcacctccagtgcaggacaattacaggcgaatctttttgtgctcaaccttgcgcagggcgacccggtgcagctgagcagcggggacagcgtgccccagtggctgggctggctgaacaacgacaccgtgctggctgtgtatgagaactgcgccgtggtgtacggtgcggacggcggcgagcgggggcgctttgaccttggcggcggcagccttgtcagcgtttcgcaggatggcgcaaacgccgctctgctgctggaaaacgggcaggtgtgcaccgccgtgctgctggataaagatctgaacgtgcagtacagcggcaacgtgcctgcggcaacccaaatcctgcgccggggtcaaaatttttatctactcaccgacagcggcgtggaatgctttgccgcagacggggtgtaccagtggggacaggagctttccgtccgtccgcaggcactgatcgcgggcaagcagctgctggtgctgtgcggcaacacggtgcagcagatcgctccgccggagcaaacggcttccagtgcccggtgaacgaggggaaaaccagtatttttgcggggaaagtgatctttataacagggaaaacaagatatgttcaagaatccgtcatttctttttgatatcctatgtacggtggtctggctggtgctgatggtgcgctacgcccgcaagggttttcttgccagcatcgtgcagctgtccggcaacctcatcagcctgctgggcgcacggcagctctctgccgcctgtgcaggctgggtgttcgaaaatctgctggccgggggcttccgcacccagatcgccgcccacctttcggaggacggggtggtgaacctttccggcattgcacagcagtacgcgggctttctgcccgaaagcttccgcgcctccatcgtggcagcctgcgagcgcagcatcaacgccgtgctggcagataatgccgtggtgcttgccgataccatcgtggaaaaagtattgcagccgctgctcaccccggtgatcatgctggtgctgttctttgtgttctacgcggtgctgcggctgctggtcagtatgctggtcaccgtgctggggctggtgaataagctcccggtcattggtactgtcaaccggggtctgggctggctgaccggcggcatgaccgctctgctggacctatacctcgtgctgtgcgtggtgtggggccttgtggtcatcaccggcggcaacctgaatgtgcttaacgacactgtgatgcacagcagtctttactataaagcgtttaatatgttcaacccctttttgtaacaggggcgacaaggaggaactatggtctgtattcgatgccagaagcgtccggcgatcatctttatccagcggatggagaatggtcagatgaagcaggaggggtactgtctgcactgtgcccgggaactgcacatcaagcccgtggacgatctgatgaaacaattcgggatgtcggaacaggatctggataacatggaaaaccgcatggagagcatgatggaggagctgggcgactccaacccgctttccatgctgatgaatatgtccggcagcggcgaggatgccgatgcggagaacatggacgaggatcttgtacccggcagcaatgccaccttcccgctgggctttaccggcacggagaagcaggacggcgaaaaaaaagccgaccgcaaaaacggcaaaaagccgcccaagcgcaagtttttggatacctactgcgaaaacctgacccgcaaggcgcgggagggcaagctggatgatatcatcggccgcgaccgcgaaatttaccgcaccatccagatcctgagccgccgccagaagaataacccctgcctgatcggtgaagccggtgtgggcaagaccgccattgccgaaggcattgccgagcgcattgccaagggtcaggtgcccatcggcctgcgggataaggaaatttttctgctggacctcaccagccttgtggcgggcacccagttccgcggtcagttcgagcagcgggtcaagggtctgctgagcgaggtaaaagcagcgggcaacgtcatcctgttcattgacgagatccacaccatcacctctgccggtgagagcgagggtgccatgaacgcgggcaacatcttaaagcccgccctctcccgcggcgaaattcaggtcatcggtgccaccacctttaccgagtaccgcaagtacattgaaaaagatcaggcgttggaacgccgtttccagcctgtgcgggtggaagagcccagcgtagccgacacccttgccgtgatgaacggcatcaagcgctactacgagcagtaccatcatgtgcaggtgcccgccgaggtgctttcggcggtggtcaccctgagcgagcgttacatcaccgaccgctttttgccggacaaggccatcgacctgctggacgaggcctgcgcctgctgcaatctggcgcacccggtcatctccgagtatctgggaatgcagaaagagctggacgccctgaagcaggaagaagccgagatggaaagcgcggatgtgaacgaagccatcgactacgagcgcgtagccgagcgcaagacccgcatcgccaagctggaatccgaactgcccgcaaagcaggctgctgccagtgaaattcaggtgaccatggacgatgtggccaaggtcatcgagctgtggacgggcatcccggcggtaaagattcgcgagaccgagttcgtcaagctggcagggctggaaaatgccctcaagcagaaggtcatcggtcaggacgaagccgtgcatctggtggcgcaggccatcaagcgcagccgcgccgacctttccggccgccgccgtcccgcaagcttcatctttgtgggccccaccggcgtgggcaagaccgagctggtcaagcagctggcagaacagttgttcgacggccccgacccgctcattcgtctggacatgagcgagtacatggaaaaatacgcggtgtcccgtatgatcggttcgcctccgggctatgtgggctacgaggaagccggtcagctcaccgagaaggtgcgccgccgcccctacagtgtggtgctgttcgacgagattgaaaaggcacacccggacgtgatgaacatcctgctgcagattctggacgagggcaagatcaacgatgcgcagggacgcacggtggatttttccaacacggtcatctgcatgacctccaatgccggcagcagcgaccagagcgcgggcagccttggctttaacaagagcgacgcccagcgcagcgaggaaaagacccgcaaggcgctggcgcagttcctgcgcccggagttccttggccgcgtggacgaggtcatcgccttcaagcccctgaccgaggagaccttgcagggcatcgccgccctgatgctggacgagtacaagcccggcatggaggccaagggcatcgcatacagctacaccccggcagcgctcaaggcgctggtgcaaaagagtcagggcgggcgctttggtgcgcgcgacctgcgccgcaccatccgcaaggcggtggaggaccccgccgccgagcgcctgatcgacggcacgctggcttccggcggcacccttgtggtggatgccgatgaaaacggcgaaatcgtgctgaaataatcataaccgcaaagcaccccggctgaaaacagccggggtgctttttgtctgctcataaaaactttttgtaatatatacttgacatttagaatggtaaatgctactatatgtccagaggataaaacaaatgccgacccggcaggaaaggagcgtatcaatgccgaagaacctgaaattaaaggccgcccgtgcggaaaaggacatgacgcaaggcgcgcttgccgaagcggcaggcgtttcgcgccagaccatcaacgccattgaaaaaggggagtacaaccccaccatcaacctttgccgcagtatctgtaaaattctggataagacattggatgaactgttctgggaggaatgagttatgaaattttcactatacagcaagaaaaaccagttggacgagatgcaggagcagaccatgcgcaaaattgaaagccatggcttctggctgctgtggggcagccttctggcggcgtggatcgtgcagacggtgttcggggctgcggacaaggctgccggagagtgggtcgtattcatgatcggctgtatctatacgggtgtcgcgtgtctgcgcaatggtctgtgggatcgccacttttcggatacgcccccggccaatgccgtgtggtctctggtggctgcggtggcggttacgctgatctgcggtttttcccgtggatactgggtcggtgctgtttttgccggtgtttttaccggcatcctgtgctttgcattgctgcagctgtgcgccgcattgacacgcaaacggcgcgagcatctggatgacccgaaggacggagaataatattacgcaaaagggctgctgcacatcgtttgatgcagcagcccctttttgcatgggtgcatggtattatcccgcattgacaaatctgcgcagaataagtacaataaaacatagctatccgcaaattttttgcatgagaataaaggagcgtttttctatgccgagcaataaaatccgcacccgttttgcaccctcgcccacgggttatatgcacgttggcaacctgcgtactgccctgtacacctacctgatggccaagcacgaggatggcaccttcatcctgcgcatcgaggacaccgatcagggccgctatgtggagggcgctgtggatgtcatctacaacaccctgcgggagaccggccttctgtgggacgagggcccggatatcggcggccctgtgggcccctatgtgcagagcgagcgcatgggcatgttcaagcagtacgccgagcagctggtggcagagggcaaggcctattactgcttctgcaccgaggagcgtctggaagccctgcacgccgagcagcgcgctgccggtgagatgacccactacgacggctgctgccgagagctgcccaaggaggaagtggaaaagcgccttgccgcaggcgagccttacgtcatccgccagaagatcccccgcgagggcgtgaccggctttgacgatgtggtgtacggccacatcgaggtgaacaacagcgagatggacgaccagatcctcatcaagaccgatgggatgcccacctacaattttgccaacgttgtggacgaccacctgatgggcattacccatgtcatccgcggcagcgagtacctgtcctccacccccaagtataacctgctgtatcaggcctttggctgggacatccccacctatatccactgcccgccggtgatgaaggacgcacagaacaagctgtccaagcgcaacggcgatgcaagctatcaggatctggtggcaaagggctacctgaccgaggcagtgctgaactatatctgcctgctgggctggagcccccgcggcgagtacgccgagcaggagatcttctccctgccggagctggtcaagatctggtccccggagggcatctccaagtcccccgccatcttcgaccccctcaagctgcgcgccatcaatgcggagtatatccgccgcctgagccccgaggagttccagaaaaaggcagagccgtggattgacagcgccgtgcacagcgccattgacaaaaagctgctgtgcgcaaacctgcagcccaggtgcgaggtgctgggtgagatccccgagcagctggatttctttgacgccatgccggagtatgacgtgagcctgtacgccaacaaaaagcaaaagaccaccccggagactgcaaaagaagcactggaagccctgctgccggtgctgagcgacgaggcgctggattttgcaaaccgcgatgccgtgtttgatgcctgcaaggcaaaggcagaggagctgggcaaaaagaacggctggctgctctacccgctgggcattgccctgtccggcaagcagcgcacccccggcggcggcaccgaccttgcctgcatgatgggccgcgaaaagaccctgcagcgcgtgcaggatgccattgcaaagctgaacggttaagttttacaaaatacccccaaagccctgcggcaaaatgacggccgcagggcttttttgcgtctttgggcgggtttggggcggttctatgcaccgcgccaaaaagcgccgctgccccgcgttacagtatatgcagacagtgcggggaacagaacaaaattccccgccggaaagcgggggatttttatgacagagcggatgggtgttttatcttcggacgggcggtgcttgcagccttcgcccttggcggcacgggcgatgctgcgcccggcggcgcggcggctggcagcggtgggcatcggctttgccggcggctgggcggtgctgtacggggcgctgatgccctttgggctggggctgacccttgggctggcagaggattgctttgcgccctgcgcagcaggggcggcgctgggactgttgctccacggactgggggcgctctcgctgcgcagcctgtgtcagctgtgtgcgctgggcgctgccgtggcagcccgctggctgctgccgcaaaagtttgtgcccgccgcgctggcgggctgcggtacattgaccggcatggcgctgtgctttgcgctgggcagcagcggggcagaccttttgctgtacagcgcggcagacgccctgcttgcggcggcaatcggcttcgggctgcgcaaatttgccccggagcgcccgggcatgggcacgctgctggtgggcacagccgtggcggcggcgctgggcagtgtgcggtgggggtggttttcgcccggggtattggcgtgtgccgccgcagagctggcgctgtgctgccgggcacagaagtttgccgccctgagcggcagcgcggtactgggggcagctctttgcgccgcagaccctgcccttgccacggcggcagcggggcttggctgtgccacggcagcggcggcggtgctggcacccggacggcgggtggagacccttgccgcctacgcgggcggctgcgtatccggggtgctctgcgtgcagccgcccggaaacgcctttgggctgctgttcagcgcctgcggcggcatggcggtggtctgtctgctgcccggcggctggcttgtcccggtggcagacaccccgcaaagcggggaaaacgcccccgcgcccgcccgcagtgcggcggcgtccacccggctggaagccgtggcgcagagcctttcctcactggcggagacggtgaacgcggtctacgagggcttgccccggcggcgggaaggtttccgctgggtcatagacaatgtacatgatactctttgttttaactgcgggcggcgggagacctgctggaagcaggaatacaccgccactatggcgggcatggaggcgctgcgtccgctgctggaacagaatggcagcgtggagaccgcgcaattgcccggggaattgtcccgctgcatccacccggcggcgctgtgcgcggcggcgggacgcagctttgcgctgtaccgcagccgcaaggaagcgcgcatccattccgaggccatgcgcaccgccctaaccgagcagtacagcgccgtagccgaagcacttggggtgctcagcgagcagctggggcgccccggcgacccggaaccctataaatccagccgggtggcagagttctttaccgggctgggtgcgccgccgcaggagtgcgccgtcacgctggacgaccttggccgcacccatgccgccgtcaccctgccgcgcacccggttcaccccgcaggagctggcggcgctggcgggggaggtggggcatatctgccgccgcacgctggaggtgccgcaggtgctctcctgcaagggcatgaccaccctgctgttcagcgaaagaccggcgctgcgggcggtgttcggggcggcaagcgcagccgcccggggcgaagtttccggcgatgcggtgcagcagttttgcagccctacggcggcgcagatgatcttatgtgacggcatgggcaccggacgcccggcggcggtggacggcaatctggcggcagagctgaccgcccggctgctcaaggcgggctttaccgccgagctggcggcgcggctggtgaacgtggcgctggcgctgaaaagcgaggacgagagcggcgcaacgctggacctcatcagcgtggacttatacaccggcacggcgcggctgttcaaggccggagccgccccgggatttctggtgcacggcgggcgggtgcgggctgtgggcgaagccaccctgcccatgggggtgctgggcggggtgaacggacagagccgggtggtgcacctgaccgccggggactacgcagtgctggtatcggacggcttactggtggatggcgcgggctgggtggcaaaacaggtggagctttcggcggcggcaggagatgcgccggaaaagcttgccgagacgctggtacagaccgcccgcatccgcgcacaaaagaccggccgcccggacgatatcaccgccgccgtgcttcggctggaaaagagcggataacggcggcagagtttccgttgcaattttcaggaaggaggggtatactggaagcatatttttcagcccggcagcgccgggcgcaggaggcggcttatgcttaccatcaacgttgcacccgacggcagcggacagtttaccaccatttccgaggcggtgctggcggtgccctacgactgccctgcggtcatccgcatcgcgccgggcatttaccgggaaaagctggtttgtgagaaaaaggatatcacccttgcgggcgcgggcatggatgccacccggctggtatggaacgacggcggcaagctgccgcacccggacgggcgtcccacccacaccttccgcagctataccgcctttttcagcggcgaaaagttgcgggtggaggatatgaccatcgagaacgacgcaggccccggcgcaaaggccgggcaggccatcgcagcctatgtggacagcgcccgggcagcgtttgaccgtgtgcggctgctgggcaatcaggataccctgttctgcgcccctctgccggagaaagagcgggagaaggacggttttctgggcccgcgcgggctggcacctcgccgggcaagcgcacagtattaccacgcctgcgagatcgccggggacattgattttatctttggcggggcagacgccctgtttgagcactgcaccctgcgcacggtggacaacggccttgcgcacagctgggtcaccgcaccctccggtgcggcgcaggggctgggctttgtgttctgggactgcgattttgtctcggactgcccggcgggcagcgtgtatctgggcagaccgtggcgtcctaccggtaaaacggcggtgctggactgccgccttgggtcgcacattgcgccggagggctttgccggctggaacgaccgcaccgacacggcgctggccggctttgccgaggcaggcagcaccggcgcaggcgcaggagagcgccccgggtgggtgcaggcgctttcggctgctgaagccgctgcgctgctgcgcactgcccggcaaaagtgccgcatggagactacggaaaggataacggaatgaaaaaattacccaatgcagtaaaatggctcatcattctggtggtgctgggcgctatgggcgcgatgatgtgggcggtgaacgaccgtgcttcccgcgtggagatgcccgccccggacaacacctttggcatttaccatacagcagagagcggaacataataaaagcaccggcagtttcccgatttgaaatctggaaagctgccggtgctttttctgtatcacagggggcgtttacttgccctcaaagtcgtccacatagggcaaatcgctcatgacgaaccagaaggtggtgcccttgcctacggtgctttgtacgccaaagcggaagctgtgctgctggaagatggctttggtgatggaaagccccagaccggtgccctgcttgcccgcgtccgagcgggagcggtagtaccggtcaaagatatagggcaggtcggcggcggcaatgcccgggccgtgatcctccacctctacccgcacgccctcagagcagcggaaggcgcgcaggataaaaatgccgtcctggccgatgtggtgcatggcgttgcccagcaaattgtgcagcgcgcgctgcatcatgtccgggtcggcgtagaccggcagttcctcctccggcagttccagctgcagctgccagccgttctgggcgcagatggcgtcgtagcgctcgcttacttcatcgcacagctgtcccatgtcaaagtgcacccgctcgcacttgtaggtgccgctggtcactttgctcagctccatcacgctggagaccagcgcggtcaggcggtcggcctcgtccacgatgatgttcatctgctcgtcccggtgggctttatcgtcgccggtcagatcgcgcaccgtctcggcgtagcccttgatgagggtcaacggagtgcgcaggtcgtgggagacgttggccagcagatcgcgctgcatctgtaccgcgtgctgcacctcctcggccatgtggttaaagtcccgggcaaggtcgcccagctcgtcgttgcggcggttgtccacctgcacggcgtaattgcccagcgccatctgccgcgcggcgctggaaagctggcgcagcggctttgtgaaccactcgctgaacagccacgccgccgacatggcaaagccgaagatcagtgccgccgccagcggcagcagggtgctgagcaccttgccggcctcggtaacgtgcacaaggctggtggtcaccagcacggtatagctgccgtcggcggtaatgcgccctaccaatagctgcgccgagccggagagccggggcgggttgagcgtctgcacaaagctgcccacgctgcggcacttgcggcgcatggcaagggcagtggcaatgatcttatcgttgttggcagagtctgaaagataggtgccgtgcaggttgcagaaggactggttctcgatcttataaatggtgtgcagggtggtgtccgagatatccacgcagaaactgttcaaagagcctttggtgtacagttccagcgtgagcttatcaaaaaaatcactgttgaccgcaagctgcccaaaagaccagctggacagcaccttgccctcggcaatggcatcgtccagccgctccacgatgctgtcggcctgattggtaagctgggtctcgatgtgtttggtgtacaaaggctccagcagctgggtggacagcagccagaacaaccccagcagaaacaggcagatgaagcacaaaaaccacatcagctgtccgcggatgccaagggtatgccgtgctttggtggtttgccgcatgctccgcacgctccttcagtcaacgggcggcatcggggtcgaacttatagccgatgccccataccgtagcaatgtagctgcggcatttgcccagatggccgcgcagcatcttcacatgggtgtccacggtgcggtcctcgccgaagtagtcgtagttccacaccttctgcaaaatcttttcccggctcagggcaatgcccttgttggaggccagaaataccagcagatcaaactccttgggggtcagggcgacttcctcgccggatacccgcacggtatggctggcagtgtcgatggtcaattcgccaaaggtcatggtatcggcggcctcggtggggcggggcatggtgcggttcagcactgcgcgcacccgcgccacaagctcccggggggagaagggctttaccacatagtcgtccgcgccgctttccagcccggcaagcttatcgtattcctcgccccgggcggtcaggatgatgaccggggtgttgatgtggcgggcgcgcatctcccgcaggcaggtcatgccgtccataaagggcatcatcaggtctaagatcaccagatcaaacccgccgccggacagctgtgccagcgccgcagagccgtccccggcttcctcgcagatgtaaccggaatattgcagatgctcgtggatcagctcccggatgcggggctcatcatcaacgatcaggatctttgccataaaacaggactccccctatcatagttcaatatacaactctattctaaagcaagaattggaaaaagctgtgaattttaagtgaatgctttggaaaaacaaaaccgtctgcacccagtataccacaccgggcggcggggcggcaatctttttgcgggaatacgcggcaaaatgcgccggggaaacttgacaagaaaacagggccttttgtaaaataaggtcgtagagagcagagcacttgcgacaaaacaggagaaacaggcatgagcatccccaagatcatccactactgctggttcggcggcgggcccatcagcccggagagccgtaaatgtatcgaaagctggaaaaaatactgcccggattacaagatcatcgaatggaacgagcagaactttgagatcagccaaaaccgctacgcacagcaggcctacgaagcaaaaaaatatgcctttgtatcggactatgtgcggctggcagtgctgtaccggtacggcggcatctatctggacacggacgtggagctggtgcgcccgctggacgaactgctggagcacaagggctttatcggcatggagcacagtgcgccctcgccctacggccgcacgctgctggtgaacaccggttccggcgtgggcgcagagccgggctgcgagatgatcggcaaaatgctggcaggctaccgcaatgcatcctttctgcaggagaccggcgagccggacctgcgcacctgcacccagcgggataccccgctgtttaccaaggccggtttgcagcagaaaaacgagcagcaggagctggacggctttctggtgctgcccaccgactgcttttccccctttgattatgtgaccgagcggatgcaccggacaccgcgcaccttcggcatccactactatcagggcagctggcaaagcggcgacaaggcaaaccgctggcgcaagcgcttcaagtgcaccaaagtcgggcgctggtgtatgtggctgcggcagtgttcgccccgctggctgcgggaaaaacggcgcagcctgcataaccgctgccgcctgcaatggaaaaaatggttcggctgccgcgggctgcaatttggccgctgcatcctgctggacaaagagctcaagctgcagctgaacagcggctcccgggtgacgctgggcgaccgggtggagagcgatggcagagtgtttatcaccaccggctattccagccagctgaacatcggcagcggggtctacttcaacgatgacgcggtcatcagctgccttggaaagatcgacatcggcgaaaacacccttttcggccccggggtgaagatctttgataacaaccaccgcttcagccgggaggaaggggtcagccgggtgtgcgatgcgggctgcatcaccgtggggcgcagctgctggatcgcctcggacgtggtgctgctcaagggcacggacatcggggacaactgcgtcattggcgcgggctgcgttatccggggcgcagtgcccgccggttcccttgtgacccgcagcggggagcagaccacccggccgatcgagacaagataaggcatcccctctcgtaaaaatgtgttcattgcggcccgcaggccgcgatgaacactcaaatttaaaaaaatcattccgctgtgcatggccagagcaacgcggaggccatttaaaatcgttgttcttagaagagctgctgcacaatgctgtgcggcagttcttttttgtcccgcttgccctttttgcgcaggaatgctatactttagcgataaaggacagtgcgctgtccgcaggtttttcggagataaggaaaagcgcttatgcgaatcggactgatcgaatttttgctcatactggccattgcgtccctcacggttgggccgcgggtggccttgttcgtggaccggtggatgcgccgcgccaaccgcgccaacgccatggcggcgcgccgccgggcagagtatgccgcacagatggccgcagaacgggacgccatgctcaagcggttccgcaccgccagcaccgtgttcggggtgggcattttgctggtgctggtgtacgcgctgggcttccgtcccattgacaccccgccgcaggcctataaagcccccgacctccggcaggagacgggcgcgatgcagacggccgtttccaccgaccgcaagacccagctggagctgggggagtatcagggcgtggactgcatccgcgccaaggacggcctgttatatgccgctgcgtggaacggtgctgcattgaaaaagcgcaccagcgaccttgtgcgcaccgatggcgggcacgctgccgccatcctgagcgtggaaggcgagctgaccggctttgcctttgatgccgccggggatgtgtggctgacccagctgaccaccgccggaggtatcttgtgccgcgcaaagcacgacagctggggcgcagcggtggagcaggtggtcacccagctggacggtgcgccgctgggggtggtgtctgccgtggaggtaagcccggcgggcaaggtatactttgcggtggcagcggcggcaggcgcggagaacgggctggaaagcgccctgcgcaccgagctgctggcgcacaccgccaccggctgcgtgtatgtgtacgaccccgccgcccgcacggtggaaaaggtgctgggcggggtggcaggtgctgcgggtctggcgctcagcccggacggcagcaccctgtatgtctccgacctcggcagccgctgcatttgggcggtggacgccgctgcccgggagctgaccgccgggggacggggctgcaccgctgcctttgccggtctgccgggctatcccggagcgctggctgcggacacggacggtacgctgtacatcagctaccgctgggcgcgcagcggctggctggaaaagaacgcagacagcaccctgctgcggggtatcgccctgcgggcggggcagaatacgcaggagcggctgttccggtgcaccgcagacgccccctgcgccgaggcggtaagccttgctaccggggcttgggagcagacttttaccggatttgcacaggacagctgtgcggcggtgtgtccggtggaaagtaaagtatatttcggtgcggcaggggcagacagcctgctggctgcaaaccgataagtgaggtgtttttgtatgaccgaagcatttgcaaaacagatcgaggccgaggcacggcaggctatgaccgagctggtggccgcggcaaagctgaaaaagggagatgtgctcgtggtgggctgctcttccagtgagatggtgggtggtcacatcggcaaggattccagcatagaagccgcccgggcgctgtacgcgggcgctgcgccggtgctggcggaaaaaggcatctggctggcagcgcagtgctgcgagcacctgaaccgcgcccttatccttgagcgggaagccgcagaaaaatacggctgggaggaagtgtgcgtcgtaccccgtccccatgcgggcggcagctgggccaccacctgctggaagaacttcaaagacccggtggcggtggaggagatccgcgccaacgcgggcatggatatcggcggcaccctgatcgggatgcacctgaagcgggtggcggtgccggtgcggctgagccttaataagatcggtgaagcaaacattctgtgcgcctacacccgcccgaagctgatcggcggcgagcgtgcccgctataccgaggaggattgagcgacatggcagaaaaaacgttggaagagatgcggcaggccgtggccgagatccgggaaaagatggcagccgccgcccgggaagccgggcgcgacccggcagcggtgcagctgtgcgccgcctgcaagacccgcacggcgcagaccattgcagccagtgcggctttgtccattgatgtgttcggcgaaaaccatgtgcaggagctgtgtgcaaactacgatgccggagcttactgcggtaagcccagccattttatcggccacttgcagaccaataagatcaaaaaggtgctggggcgggcaagcctgatccaaagcgtggacagtgagcacttgctgcttgccatcgagaaggaagccgccaaggccggcatcgtgcaggatatcctgctggaggtgaacatcggcggggaagagagcaagaccggcgctgcgccggagctgctctggccgctgctggataccgccgctgcacaggagcatatccgggtcaagggtctgatggccatcccgcctgtgaacgatgacgatgcccagaaccgccggtatctggcgcaggtgtatcagctgttcgtccgggcaggagagcgcggctaccgcaacgtggagatgcagaccctttccatgggcatgagcggcgattttgagaacgccatccgggagggcgctacccttgtgcgcatcggcaccgccatctacggcgcgcgggattacagtaaaaagtaacgataaaaacggaggaaccatgccgaaaaccaagaccaacgaccccggggcgcaccacgcaagcagcggtgcgctgatccggcgttttctgccgtatctggcaaactataagatggtgctgtgccttgatttgttctgcgcagcactgaccaccctgtgcgatatcgtgctgcccaagatcatgagcaccatcacaaactccgccatgggggtgggcatcaccctgacggcgggcatcgtgctgaaactggcggcgctctactttgtgctgcgcatcatcgacggcgcagccagctactatatgtccagcatcggccacatcatgggcgtgcatatcgaaacggatatgcgccgggatgcttttgaccacctgttgcagctggatcacacctactataacaacaccaaggtgggcaccatcatggggcgcatcaccaacgatttgtttgatgtgactgagttcgcccaccactgcccggaggagtttttcatcgcgggcatcaagatcgtggcgtcctttgtcatcctgtgccgcgccagcatcccgctgaccttggcagtgtttgcctgtgtgccgctgatgggcgtggtgtcggtgtacctgaacggccgtctgcgggcgcggtttcgccagcagcgcgtccagatcggcgagctgaactccaccatcgaggacagtctgctgggacagggcgtggtcaaggcctttgccgccgaggacgaggagcgggaaaagttcgccaagggcaaccgcgcctttgagcagatcaagacccttggctactacgccatgggcgcgttcaacacctccacccgcctgtttgacgggttgatgtatctggtggtcattctggcgggcggtctgtcgctggtatacggtaagatcaccgccggcgaccttgtggcctatatgctctacgtcaccaccctcatcgccaccatccggcgcatcgtggagtttgccgagcagttccagcgcggcatgaccggcatcgagcgctttgccgagatcatggacaccccggtggccatcaaggacgccccggacgccgtgccattgcagcccggccccggcgagatccggttcgagaaggtatgctttgagtacccggacgaccacaacaaggtgctgcacgacgtcagtctggacatccgcgccggggagcgtctggcgctggtgggtgcctccggcggcggcaagaccaccctgtgcaacctgatcccccgcttttacgaggtgaccagcggccgcatcctcattgacgggcaggatatccgccgggtcaccctgaagagcctgcggcaggatatcggtatcgtgcagcaggacgtgtatctgttcagcggcacggtggcgcagaacatcgcctacggcaagcccggtgctacccggcaggagatcgaagccgccgcccgtctggcgggcgcggaaaagttcatccttgcactgaaggacggctacgatacctatgtgggcgagcgcggcgtcaagctgtccggcggacagaagcagcgcatcgccattgcccgggtattcctgaagaacccgcccatcctgattctggacgaagccaccagcgcactggataacgagagcgaaatccttgtgggacagagccttgaaaagctggctcatggccgcaccaccctgaccatcgcccaccgtctgaccaccatcaaggactacgaccgcatccttgtgctgggcgaggagggcatcgtggaagagggtacccacgcccagctgctggaaaagcagggcgtctactaccgcctgtggaaccagctgcccgcagaggatggggaataaaagcgcctgaaatacaaaaaagacacccgaaagggtgtctttttgtctcttgtcaagggaagtgaacgggtttcatctctaggtgcccaccgattcatcttgtttggtgttttgcatccaccgcaccagcgcttcggcgtcctgtttgcctttggcgtacattttttcaaggccggcgcggttcttggtcagggtggacattccctcggtgctgtccggggcgatgatgcagacaaggccctgtcgctccagctcccgcgcccgctggacagccgtgttgtaccgccatgcccggcggcgcagcccctcggctgcagcggggtaatgcgactgcagcaggtgtgccagatgcttgtcccgggcatcactactcaccagcccgatgggcttggtcaggatgagagccacccggtcgcagccgtgggcaaaggcccattccagcgggacggggtcggccaggccgccatcaaaataaggcacgccgtcgatgacgcagggctggtcgatgaccgggatgcagcaggacgccatgaggatgcggtagtcgtccgggtggaggtctgccttggtgaaatactgcgcctcgccgttctgtgcattagcggccaccacgcagagctctgccgggctgcgggcaagcgccgcgtaatccagcggattctcgccgcctgcattgctgagggtgccgtagacatagcccagatcgagataggagtgcttgcggatgaggttgtgcacgctcatgtactccctgtggaaggagtattcatcgtaaaagggcttgttccgcccatgctggcctgccagataggacgccatattggcgctgcccgccgaaacgccgatgcagagatcgaagcggaggtcctcctccaggcagcggtccagcacgccagcgccgtaaatgccccgcaggccgccacccacatcgatgacaccgtatttcatggtctgttcctccatcgtttaattccatttccctcccagtataacgggacggcgggaaatactcattgagcaaacggcgggatctgatgcaatttgcggcagaaagcaggatctgccgcaatgggggcaaacaaaaacggccagcgtatcatgtgctctgtgatatgtaccccgcctgtggaaccagctgcccgcagaggatggggaataaaagcccttgaaatacgaaaaaagacacccgaaagggtgtcttttttcgtatgggccaggcaggacttgaacccgcgaccaagcggttatgagaacgtcgctaattttgaaatcccgtttttcttgtgaaatcttgtgactatctgataattctatgaaagtgcctttgtgtactttgacgtaacttttggtgtcttttagtctctaaaacggctctttgtacccagaaccgtacccaagaatttttgggtacgaaactcgacacttactgttaccattttcgatttacatagctcactttcaaaattgaaggtgggctttttcttttgcagaaatcagggaggaggttttccacatgaacaagcactcgcagttgaaaatccgaggtcacaccaaatgacgctagactacttctatggtcagtcgggcgaattgttctcctatttccgcatccccaaggcactgttccatgactgccgcttccgacaactctccaccgatgcccggacactgtacggcatcctgctggaccgcatgagcctgtcggtcaagaacggctggctggacgagcgggggcgagtgtatatcatttacaccgtccgggaagtgcaggaatctctctgctgcgccgaacacaaggcggtcaagctgttccgggaactggaggacttcgacctcatcgagcgcaaacgccgtggtctgggcagacccagcctgatctacgtcaaggacttttcctccggcttgccaaaagcgcaagtacagaattgcccaaacggcaattcaggcgctgccgaaagcgcaactctggaacagccaaaaccgcaagcaaataagactgataagaataaaacagagtggaacgatcctgaccctatctgttccgggggcatccgggagcagcttgaggattatttttatcaggcattggaggtagacctcctgcttcggctctgcccggatgatgaggatactatctaccagatcgtagacctgcttgtggatacctgttccaccaaacgcaagatgttgcggatcgccggagatgacaaacctgccgaggtggtacgcagtcggctgaaaaagctgaacgctgaccacatccgttttgtgctggattctctggcagaaaacaccgccccggtgcggaacatgaagcagtatctgctggcgatgctctacaatgcgcccaccaccatgaacctctactatcagaacaaaacgaaccacgactttgcgcgcggttcaccgaaagcggggtgatgttatcgcaaagaaagctacgattatcgcagtcaccaatcaaaaaggtggtgtggggaaaagcaccacctgcgagaacttaggcgtcgggctggcaatggagggcaaaaaagtcctgttggtggacactgacccacaggggtctttgaccatcagcatgggctggaaacagccggacgaactgcccaccactctttccaccctgatggcaaaagccatgaacgaccagcccatccatcccggagagggcgttctgcaccatgcagagggcgttgatctgatccctgccaatatcgaactggcagggctggaagtggctctggtaaacagcatgaaccgggaaaagatgctgaaacaagtgctggacagtgccaagcgggagtacgattttatactgctggactgtatgccttcgctgggaatgctcaccatcaacgcgctggcggcggcagacgctgccttgattccggtgcaggcgcagtatctttcggctaaaggtctggaacagcttttgcagacggtgcagaaagtccggcggcaaatcaacccgaagctgaaaatcgagggcatcttgctgaccatgaccgacagccgcaccaattatggaaagcagatcagcaatctgatccggcaggcatacggaaagcacctgaaggtgtttgaacagaccatccctcgctccgtccgtgcagcagaaaccagtgcggcaggcaagagcattttccagcatgaccccaaaggcaaggtggcagaagcctaccaatctcttgcaaaggaggtgctggcagatgccgatcgacagcggaaacttagctctgaaagggctagatgacctgttttccaccgaggaaaaccgacaggaggaacaacgggagcaggtgcagcagattcccatcgacgagctgcaccccttcaccaaccaccccttcaaggtgctggacgatgaagccatgacccggacggtggaaagcatcgcacagtacggggtgctggctccgctgatcgcccgcccccgcccggacggtaacggctacgagatcatctccgggcaccgccgtcagtatgcagctaaacttgccgggctggataccctgccggtcattgtgcggcagatgtcggacgatgctgctgtgatattgatggtggattccaaccttcagcgtgaacacatcctgcccagtgaacgggccttggcgtacaagatgaaactggatgccatgcgaagaactagcggtagaccgtcaaaagaaaatgtgtcccaaattgggacacaaaaacgttccgaccaaatcatggccgaagaacttggtgaaagccgcaatcaaatccagcgtttcatccgcctgacaaaccttgttcccgaactgctggacatggtagacgaaaagaaaatttcctttaatcccgctgtggagctgtcctatctggacgaaagccaacagcgggattttttagaagccatggaggacacccagaatgcaccgtccctttcccaagcgcagcaactgaaaaaaatggcacagcagggagagttcagctacgaaaaagtcttcgatgtgatggggcaggagaaaaagagcgagaaagacaccgtgaccatcaaaaacgagaccctgcggaagtatttcccccgcagctacaccccaaagcaaatggaggagaagatcatccagcttttggatgcgtggcagaaaaaacagcagcgccgcaacgagcgctgaccgtaaagtaagaccccatggggtcttttttgtttgcaaaaacttggagactaactattaaaagtcaagccccaaaatgaaaaaatccgtctgccgaccgctgcccctgacaaacagcattcagttagctggaaacggcttgtgaaaataggtagtcgccgacttaataaagagctctgagatgaaagtctcagggcttttttattgcatttcggggcagaaaatagtatcataaaaggcagaaccttatactttctacagatttccctgttacactgaatgcacaaggaaaggagattctgtatggacaaattaacgaaaaaagggctggacggtacccagctcaagaccattgcactggtgctgatggtgctggaccacattcattatttcttcgagttcaccggctgcatcccgacggtgttcagtatgctggggcggctcagtgcgccgctgtttctgttctgcacggtggagggctttgcccacacccatgaccgcaagcggtattttatccgcatctgggctatcggcacagctatggcggcgctggaattctttatgatctacgccaaggccttccggcgcggggatgacttttacccgctgaatgctatttttcaggatctgatgctgctgtgcatcgtctggcagggcatcgactggctgcgggagaaaaaattcgcaaagggcattggcgctattgccgccgttctgtgctggccgtatgtggtggtagtatttctgctgcttttccccggggtacaggagatgcccatcgcttcgtcagtcgtggcctttgtcatcaccagcccgctgcccatgtggacaggcatcacggacggcagctggagttttctgctgggcggtgtgctgctgtatgcattgcgcggacggcgcaaagtgcagctgacagtatgggcactggtgattttcctgtgtgactttgcgctgacctttgggatggcttgccgacaggagggttttgtgtggacgcagatgttcaccgactactacgagtggttcgaggtggcggcggtgctgctgatgctgctgtacaacgggcagcgcggcagcggacacaagcagctgttctactggttctaccccgcccatgtgtatctgctgtatggggcatcctgccttgtttataacgtgttgaggtgatcttgtggcaaacattctggcagtggatgacaatttagagctctgcaagctgatccgcaccgccttggagcgggacggccaccgggtagaaacgcggcaggcgggcagagatctgaccgagccgctctgccgctgggcagactgcatcctgctggatgtgatgatgcccggggaggatggctttgcggtctgtcggcgcatccgcagcctgaccgaagtgcccatcctgtttctgagcgcccgcaccgacgaggccgctgtgctggaggggctgggcatcggggcagatgactttttgtccaagcccttccgggtggcagagctgcgggcgcgggtggcggcacatctgcggcggcagagccgcaccccggcgcaccggatggtgcgcagcggcgtagcctttgacctgaccgcccggagcgcggcggtggaggggaaggcgctgcccttgacccgctcggagtatgccatctgcgagtatctggcgctgcacgcagggcagacctttaccaaggagcaaatttacgaagcggtttttggcattgacggcactgcggacgacaccgccgtgacacagcacatcaaaaatatccgggcaaagctgcgggcggcaggcgtgccggagccggaaaagctgctcaataccgtatggggcgtggggtaccgatggaaaagcgaagactgacctctctgcgcagcgtgctgctgcaatatctggtgcgcacggcactggcctgcctgctggtcgcggtggggtggctgctggtgctgatgctgtgggtccagaacggcgggctgtttctgcccgccaatcaggctgcacaggcctgtcagaaagccgcacaggacgttttaccgggcatgaccgccgccacctttgacgagacgcagctggactcactgtgccggtacgccctgtttgccgcgccggacagcagcgaggtgctggccaccaacatggatgccgggcacttgcagcgggcaatggagaaccggcaggggaaaacccgctggcattttggctacacacagtattatatgacgtcaaaattgcaagacggaacggtttgcctgctgcaatttgactatgccgtgccctacgccgaccctgcgctgcggggtgtgctgccggatatgcagaccgtgcactgcattctgggcattctgctgttggtaggcgcggtggtgtggagcacccacaggaccgggcgcttcctgacccgggagaccgaaaagctgaccgccgcagcacaggcggtggcacggaaggagctggacagcgcggtattttccggcgcgaaggtgcgggagtacgagagcactttacaggcattgcagaccatgggcgacgccctgaccggcagcctgcagaagcagtgggccatggagcagcggcagcgggagcagatcattcagctgtcccacaagctgaaaacgccgctgaccatcattgagggcaacgcggaactgctggcagaggatgacggcctgaccgcagagcagaaagcgcagatagagtctattttgcagggcgcagagcagacccgcacctatcttggcaagatccgcgccgaggtgcagaccccgctgcggtataaacgaaatgcagaacaatgacaaaataaacgatttatagctgatttatcctgactgtaaaaaaggcttccaaaacgcccacaggcgttttggaagccaaataaaaaatctttattccgctgagaatatccagagcgaagcggaggacatttctaatcgtcttacgcgaaagggctgctgcacaaaacgtgcagcagccctttgtttgtatttactgttttgccagctgtttgtccagccatgcggcgatgtccgcgaagacctccagcttgttggtttccaccagcagctcgtggcgggcaccggggtagaagatgctttcgatgttctgcacaccggcgtccttcaggctctggatggcgcggcgcacgcccttgccctgctcgcccaccgggtcggcatcgccggagaggaagagcagcggcagctccttgggcatccgtgccagaaaagccgggtcgtgcaggcgcaggatgccgctgaacatactgtaataggcgttcagcgtaaaggtaaaggtgcagcgctcctcggccagatacttgtccacctcggcctggtcgcggttgagccagtcgtgggtggtgcggccctccagccccttgttgtagcccataaaggaaaggttggccacaaggctgctgcggtagtgccagccgtggaaggcggccagcacccggcaaagggtcttggcaaccttgaccagcgccttgggctggaaacctgtgcccatgatgatggcaccgttcagctcccggccatactcgcacaaatactgccgggcgtagaacgagcccatgctgtgccccagcaaaaagtagggcaggtttgggtacagctccttggtcagcacggttacggcgtgcaggtcggccagcacagcgcggttgccgtccggctcggcaaagtagccgtagtcctccttggtgcggatggatgcaccgtgccccagatggtcgtgcccggtgaccagaatgccccggtcggccagatattccgccaaggggcggtagcggtcgatatactccaccatgccgtgggacagctgcagcaccgcccgcacctgaccctccgggacgcagcgaaaaccgtgcagggtgcgccccggcacggtggagggaagggtaaagtcgatgaaccggctcatggaaagagccccctttctgcgttacagtgcgctgagcttgcggcggcaggcgctgcagatgcagtagccgccgaactggatggcttgctcgtccacctcgccgcagaaatcgcagctgccggcggggcggtgctttttcaggacgatggcgtccccatccacaaagatctccaatttggtgtcggtgtcgaggtgcatactagtgcgcagctccttcggcagaacgatccgtcccagcgagtcaatgccgcgaacgatgccagtgcttttcataatgtgtcattctccttcactattccttattcctttttagcaaccactgacacaataggaaaattgtgccagcgctaataagcttagtatacaaaaaataacaccattcgtcaatgattgcgtgctgattcgacaaaaaacgaccttttgcacataaaggtgggggagattctctccgtgaaaaaaggggttctgaaaagcccgcaggcttttcagaacccctaaattacaaataattctttctcgccgtctcagctcagctccacaggggcttcgggctggttctccacgcgggcgctggtgcgtccctcgggacggatctctccggcggcgaccagcgagatgacgtccgggcgggcaaagtgcagggcaacaagggcgatgtccaccagcgcggtggtgatcaccgcctgcgcaatgcccacggtcacggcgcggcgtcccatgtgcttcagggcgctgagccggaactcgttgccgatgacgaaggcgataaagcccagcgccacctgtgtgaggatgccgtagccctccacggcaacaaggctgccaaagccaaagccgaaacggctcagccccagccgacccagaaagaagggacccagcagcaggccggtaagcaggtaagcggtgacggcgggcagacgcacggccttggcagcgcgtgacatgagcaggccggcgatcagggcaagggacagacagatcaacatttgttccataatgtggtttgtattgggtgcgcagccaaaggccgcagcactcggttcctccttgtcaaaaaagtatcgaaatcctgtgtgaaatccagtgcggggggtcaaaatgggaaaacgtatccagtataccggaacaacggaggaaaagcaatcatcctgcgcgtttcatacatcttttgagacgaaaagacagaaacaggacgagaaaggacggaatacaagcagttcggctgccgtttccctttacgaccccagccgtgaaaaagggatagcagagcgcccgcaggcgttccgctatcccgaaatataaaatatgctcttagttgaacttgaagatcttgcgcagctggcggtaggtggctacgaccaccttgtcgccgccggggaagtgcaggtcggtcaggccgccaaggttcacgcgcacggcgcggtagacgccgggggtaacgtgatccttgaggtactgccacagctctgcctttttggcgtgtgcctcggcgctgccgtccagcagcaggaagatgtcgctgaccgccatcatgacggacaggtagtgcaccatgtaggcgcgcagacgcttctggtccttcagcgcgtccagatcctgacagtcgatcatgtgcctggtgacccgcagctgctggtccacacggccgaccatcacgctctcgttcacgctctggtctgcgcggccgatgaagtagcggtacagatccagatccatatagtacatgctcttgacatagggcaggggctggtacacaaagatgttgtccacatagaaggtgtgcttgggcagcaccatgccgcactcacgcagcacctcggtgcggtacatgaccgagtgcatcagcaggttctgatccgggcggaagcgccggacgtgcacccagtcaaacagacggttctgcgggaacacgttggtgtagcgcacggtatggctggtgccgtcctccacgtgctcgtacacatagttgcagatcatcagatccggcgcggtgccgcgggctaccagcgtggtcaggcgctccagcacctttttcagggcgtcggtgtccagccagtcgtcgctgtccactaccttgtagtacaggccggtggcgttgcgaatgccctgattcacgccctcgccgtggccgccgttctcctgatggatggccttgacgatggtggggtactttgcggcgtactcgtcgcagatggcgggggtgtcatccttgacggaaccatcgtccaccagaatgatctcggcctgctcgcctgcggtcagcagcgtttcgatgcagtgacgcatataggctgcggaattgtagcagggcacagcaaaggtgataagtttctgctgcatattataaatgctcctttttacgttgcatggtccatgtcgggcagtatgcggggtggcatggagatatgtgttctcattatagcattttcgcgcctgaaaagctatccttcccgggcagaaagagcgcttattgcacacttttgcgcaaagtgacgcttttttctgcccaaagtgccggttttgtggtatactgataaggttttgagcgttctgcgcgtcagtgcacctatatatataacggaggaaaccatggaaaacccgcacagtatcctgaaaaaagttttcggctacgacagcttccgccccgggcaggaggagatcgtcagccgcctgctggccgggcaggatgtactggcggtcatgcccaccggtgcgggcaaatccatctgctatcaggtgccggcgctgcttttgccgggcatcaccatcgtggtgtccccgctggtcagcctgatgaaggatcaggtgggggcgctggtgcaggcgggcgtggcggcggcttttctgaacaacagcctgaccgacaaccagaaggcgctgatgctgcaccgcgcccgggagggctggtacaagatcatctatgtagcaccggagcggctggagatgccgggcttccagcggtttgcgcaggagcggcagatcagcatggtcacggtggacgaggcgcactgcatcagccagtggggacaggatttccgccccagctatctgcgcatcaaggcgtttgtggacggcctgcccagccgcccggtcatcggcgcgttcactgccaccgccaccgcccatgtgcgggaggatatccgcacccatctggcgctgcaagcgccctacgaggtgactaccagcttcgaccgccccaacctgtacttcgagacccggcgggcactgcccagccagaagcccaaggagctgctggaactggtgctcaaagagggcaatcatgcgggcatcgtgtattgcagcaccacccggcaggtggacgagacagtgcagctgctgcagagccgcagcatccgggcggcagcctaccacgccaagctggatgcggacacccggcggcagaatcaggacgattttctctacgaccgggtgcaggtgatggtggccaccaatgcctttggtatgggcatcgacaagccaaacgtgcggttcgtcatccattataatatgcccaaggacttggaaagctattatcaggaagccggacgcgccgggcgcgacggtcagcctgcccggtgcaccctgctgtattccggcacggatgtgcgcaccatccgctttttcatcgacaaagagcgggaggccgacaatggtctgcccgcggatgtaaaggccgaagccgcccgcaaggcagaggagcggctcaagtacatgaccttctattccaccacccagcactgtctgcgcggctttctgctgcaatacttcggagaagcagcgcccaaaaagtgcggcaactgctcctgctgccttgccgccgagcaggaagcccagctgcaggtggagtacgcccgccgccgtgccgcccagagcgccgaccggctggaaaagccccgccgcgcaaagcccgccgcagcgggcagcctgagcgaggcggacgaaaagctgctcaacgccctgtatgcggtgcgcaagcgcctggcgggcaagcagaacctgcccgcctttatggtgttcaacgatgccaccctgcgggagatggcagagaaaaagcccatgagcatcgacgagctgctgaacatcagcggcgtgggcgaaaagaaagccgcccgctacggcaacgccttcctgcgcgttatcgaggacgccgtgggcagccgggaatgagaaaggaaagaagccgctgtacggtctgtgcagcggcttcttttagtgcgggacgatttcgaatggcctccgcgttgctttggccatattcagcggaagaattatttttaatagagcgtttgtcgcggcctgcgggccgcgacaaacgcattttcacgagaaggagttcagcaccgcttaccgttccatggtatgggtggcgaacaccttttcgtcctcccaccacacaggctgcccggcggcaagggacttgggtacgtccagcaggcgctggttgcggctgccgcggaagcgcagagagatgtcgtgctcggcctgcacgaatctgccgtccaccagcacatccagcagtgccagcagttcgtcggtcacctcgcaccgcgcggggctgggctctttgccggtaagctgttcccaagtgtagccggagtagcaccacaccgtcttggcggggtacagcgccttgaagttgcgcacaaagggcagcagctcccgctggttctccggctcaaagggttcgccgcccagcagggagagcccggcgatatagtccggctgacaggaggcgaatacctcgttgcgcacggtcttatcaaagggctgaccgtagtcaaaatcccatgccacggcgttgaagcaacccgggcagtggtggcggcagccggacacaaaaacgctggtgcgcaccccggggccattggcgatatcgtaatatttgatgtttgcgtagttcatgctcatgttcctgtcgtttgctgaaaagatgtttggagcggcctttcggccgctccaaacatcaaatcaaaaataaaattttgctgttgttacagatgcagcacgcggtccttgatctcctgcgtgcgtccctggttccagaactgggtgccgatataaccgcaggtgcggcgggcgacgttcagcttgttctggtcgcggttgccgcacttggggcactcccacaccagcttgccgtcgtcctccacgatcttgatctcgccatcgtagccgcacacctgacagtagtcggacttggtgttcaactcggcgtacatgatgttgtcgtagatgaactgcagcacgctcatgacggcttccagattgtcctgcatattgggcacttccacatagctgatggcaccgcccggggacaggcgctggaagtcggcctcgaatttcagcttggtaaaggcgtcgatgggctcggagacatggacgtggtagctgttggtgatatagttcttgtccgtgatgcccttcacgatgccaaagcgcttttgcaggcacttggcgaacttgtaggtggtggattccagcggggtgccgtagagggagtagtccatgttctcggccttcttccactcgttgcacttgtcgttcatgtgctgcatcacgctcagggcaaagggcttggcaccggcatcggtgtggctcttgccggtcatatacttcacacactcgtacaggccggcatagcccagactgatggtggagtagccgccgaacagcagcttgtcgatcttttcgccctttttcaggcgtgccagtgcgccgtactgccacagaatgggggcagcatcgctgggggtgcccagcagccgcttatggcgtgcctgcaaagcccggtggcacagatccagacgctcgtcaaagatcttccagaacttttcaaagttgccgccggagctcagggcaacgtccaccagattgatggtgaccacgccctgattgaagcggccgtagtacttgggcttgccggtctcggggtccacatagggagtcaggaagctgcggcagcccatgcaggtgtagcagtggccctcgccgttcttgtccaccttgagttccagcatcttcttttccgagatatagtccggcaccatgcgcttggcagtgcacttggcggccagctcggtcaggtagtagtagggggtgccggggcggatgttgtcctcttccagcacatagatcagcttggggaaggcgggggtgatccacacaccggcctcgttcttcacgccctgatagcgctgacggatggtctcctcaatgatgatggcaaggtcggccttttcctgcgggttgcgggcctcgcccagatacatgaacacggtaataaagggtgcctgaccgttggtggtcatcagggtgactacctgatactggatggtctgcacgccgcggttgatctcgttgcgcagacggcgctccacgatctccttcttgcgctcggcagagacgtccagaccttccatctccagctctacctcagcggcgatcttcttgcgggagacgtccacgaagggagccagatgggtcaggctgatgctctggccgccgtactggttggaggccacctgtgcaatgatctgggtggcaatgttgcaggcagtggagaagctgtgcggcttctcgatataggtgccggagatgacagtgccgttctgcagcatatcttccagattcaccagatcgcagttgtgcatgtgctgggcgaagtagtcggaatcgtggaagtggatcagaccctcctgatgggcttttacgatctccgggtccagcagcagacgggcggtcagatccttggagatctcgccggccatatagtcgcgctgtacactgttgacggtggggttcttgttggcgttttcctgcttgacctcttcgttctggcactcgatcaggctcagaatacgctcgtcagtggtgttggtctgacgcttcaggctctggacgtagcggtaggtgatatagtggcgtgccacatcgtgcgcctgaatgtccatcagctggttctccaccagatcctgcacctcttccacgctgactgcgcggttaagctgctggcactggtcggtaacggctgcggcgatctgggtgatctgctcccggctcaggcgagcctgaccgcccacggaatcgctggctttggtaacggcggtgatgatcttggtaatatcaaaaggaacttctgcaccgtttcgtttgatgatcttcatcggttctcctccttctatataggcgcattgtgaacgggtacctcttaccataagagatacccgtctgcgcacaacgatatccaacaaactgaatgtagctctattttatcattatctagtggcaagtcaagcaaaataccactatattttgcgttttgtagcaatcgccaaaaattgtggatatttttcgggacaaaattttgcacggaaagacttgacagagcgacttgctttccggcgggtaatatcagccgccgtctatacccggttgggatttgctctgcctatataatgtaataatataaggcagcgccggatgaggtgcagcacccattagccttgctgcgccctctcagtcacctgcggtgacagctctcccaaagggagagccaagagcactgccggaaactttctcattgcgcctaatactttagtactgaactttacggcttggctccccctttgggggagctggcgcgggagcgcctgagagggcatttaccccccccgcaaagaaattggaaaaaagatgtcaaaaagtgttgacaagagccccggggtgtggtattatacttgagcgccaagcgcacatctaagtagggcgaggaagagacatcaaacgagattccgtaagtagtggcgagcgaacgcggaagagggcaaaccgggagtagaaatacttccggggtacggactgcttttaggacttaatctgttaaccgaacggcatgggaaggccggtcagagagtgtgagaaccacgtaggtgaaaacggagagagctgcgcaggatccagagtacggccagacacgtgaaacctggtcggaatatggggggaccaccctccaaccctaaatactacccagtgacctaaagaagaagtcgaagcacaaaaaagctagcgctgcgccagtcggcgctatcgctttaacgcttttttcgcttctccatttatagcccctcagtcgctgcgcgacagctcccccgagggggagcgcctgagggggttcgttccctctttttcagccattcgcgcagttttaacccccattcgcgcagaatttcttttgtttttgcctagtttatggtatatttatagtaacgatacccccgtataaaacccacacgaaaggagcgaaactttatgaaagccaaacgcattgtaagcatcctgctgaccggcagtatgctgctgtccctgctgccggtgtctgcactggcagccaccccggtgttcgatgcacccgcccagaccacggccaaaaaggctgcaccccttgtacaggaggccgacgcctcccgcagcaccgaggaggaagccgccacccgcagcagccgtgatctggacgcagaaaacggcaccgccgatagcattaccatccagctgaatgccgaagggaagcccgaaagcgaaggcgacagtgagcattgggcatatgactatgcaacaagctttagcttgaacttgcgtcaaggcaccttcaccctgcagccctcttcggagcccggggctgaaagcgcattgcagacagatctcgatatttataaagatgccgaatttaacggcggcaccgtcggcaaaagagcccacaacgagggcaccatctccaatggtaccttccaatgggaggtgtacaactacggcaccatctccgacggtaccttccaaggaaagttgcacaactaccaaaccatctccgacggtaccttccaaggaaagatgtacaactccggcaccatctccggcggcatctttaagttaactgttactgcggaagccatcttccagccggctcagatcgagggtggaacctttgaagatggtatgaagatctatcccgatgcgtactaccccaccaccatcaccgacggcctgtttgacggcaaggttttcaccgaagcaggttccctcatcaagccacttacgatcagcggtggcctatttaccaaagccgtggatgtaagcaacatcaccaacctgcctaatcttcagatcaccggcggctattttgtaagtaagcccactgtgccggaaggcagcgtcagctttacctctgtgagcgatcagaatggcagaaccttccaagtgcgtgtaaatggtggtttttctaaaaacggctatgaagcgctgtatgtgccccacggtatgtctgagcggcaggcaaaccccattaccgtaaagactgatactgcactgaccgactgccttgcagacggcgaatccattatgggaaccgataaagtccggaaaaacaatgacggcagttacaccattgaagtgtatcaaccggagtccatcgtgctggtgaccgagaagcccgcgccgtccacaccggacgaacccggcgacgagatcgacccggcgttctcctccggcgcagccgcacttggcatcgtgctgggcactgcgggtctgggttatgtcgcttatatcaacggcacttccctgtatctgcactatgcgctgccgggcggctttatcccctccacccgtcaggagctggcaaacgtcctgtggacgactgccggcaagcccgaccccgtaagcaccgccctgtataccgatatccccgctgacgctatcgagcagcagaaggccgcccgctggtgcgtggagcagggtctgctctccgactatggcgcaaccttcggcccggacaccacggtgaccaatgcccgcatcatccgcgcatggaaccgcctgaaaaagctgcccgtgaccatcaccaaataatcatcctcacattcatcctttcatgtacaccgccgcccggcttgcttccacaggccgggcggcggtgttttcactcctccatctgctttgccagaaaggccgctgccactgccactgccttgcactgggcgtcctccgggcaggcggtgcggtcctcggtcagtaaacccaccgcgccggtcacgtccccgcccgccagtaccggtgcggcgcatagcagcacccggggtgcgccctcgcagggcagcagggtcttttccggtgcgccggggctctggtagggcttgcgggcatccatcagcttttccagcggctggctgatgctgcggtcggtcagctcccgccgcccgctgccgctgaccgccagaatgcggtccctgtcgcacacaaaggcggtcagtgcaaactggcggctgagcacctctgccagctgggcggcaagggtgttcacctcgcccatgggcgagtactttttaaagatcacttccccgtcgccggtggtaaagatctccagcgggtcgccccgccggatgcgctgggtgcggcggatctccttggggatcaccaccctgccaagctcgtcgatgcggcgcacgataccggttgctttcattattttgccctccttgcggtttcctttgtatgtagtatctgtcagcggcggcaaattataccggcagcgcattttttgctttgcccgccgcattgcgttccgggcggggttctgctacaataaataggaataaacccaaagaaagcaggtgtccgcatggcacacatccttattctgggcggcggtgccgccggactggccgctgcgctggcggctgcacaggccgcgcccgctgcccgcgtcacggtgctggagcgcaaccccaaggtgggcaaaaagctgctggctaccggcaacggccgctgcaatctggacaacaccgccattgcgccggaaaagtacttcaccgccgaccccgccgcgctgcggcctttgctggcggcggtggatgccgccgcgccgctggcgtggtttgagcagctggggctgtatacccgcaccgatgaggccgggcgggtgtacccctattccaatcaggcggcagacgtgctggcgctgctggagctgcatttgcagcggcacaaggtacaactgcgcaccggctgcacggtaagcaccttgcggcagagcaagggcggctacgccgtgcagtttacgaacgccgagggaggcaccgaaaacctgcgggcagatgccgttatctgcgccatgggcggcgccgccgggccgcagttcggcacggacggcttcggcacccgctttgccgccgactgcggcgggcagatgcgccccctttacccctgcctgaccgccctgcaatgcgcaaagccgaacaagagccttgcaggcattcgcgccaaagccgccgcccgcctgctggacggcgaccgggtattggctgaagaaatgggcgaagtgcagtttaccgactacgggctttccggcatctgcatcatgcagctgtccggcctgcttgcccccgggcgcagcccgaagcacccggcggtggagcttgatctcttccccgctgtgccggagacagaacttgccgccctgtttgcggcgcgtgcaccgctgcttgccgaggacacggcggcggcgttctggctggggcttttgcacggcaagcttggccgcgccctctgggctgccgccgccctgccggataccgccccccacgccctgcccgcaggcagctggcagaagcttgcccacaccgccaagcactggcggttcgaggggcttgccccctgcggctggcggcaggcgcagaccaccggcggcgggcttgccctgaccgaggtggaacccaccttccagttcaagggctgtccggggctgtacttcgtgggcgaaacactggactgcgccggcagctgcggcggcttcaacctgcactgggcgttcggcagcggccttgccgccgggcgaaacgccgcaaagcacctttgcagccgaaaacggtaacaaaaaagggatcctgaagcgccagctggcgcttcaggatccctttttatttttactcgcccttggaaagcagctttgcacgctccagcgcggggcgcagtgccagatacagcaccacggcgcaggcagtggaagccacactgttcacaaaggtgacgccgccggcgatcttggtcagcgcctgtgccacggtgtactcctgcccaaagatgtacacattgcggaagtagccaaggaaggggtcggtgaacacgttcagcagcagaccggaacccgcagagacgatcaccttgaccagatacccggcgctgtgacgatcctgatcccgcagcttgaacaccttatgtgccacggcaccgcaggtgatgccgatgatgaacttgagcacaaaggtggtaatagcgtagcccgggtcaccggcaaggatatccgccagcgccagaccgatggcacccgccagaccgccggatacgccgtccagcagcagcgccgtcagggcggtaaaggtgttgcccagatggaacgaggagccgccgtagaacgggatgcggaagaacaggtaagccacaaggctcagcgcagccatcacgccggtaagcgccagctcgtgcaccgtaaagcggcgcttgtacagcacactgaaaaacaggatcaggataacgacgactgccagcagcagccacattgcagtagtagacatgatactttccctccaatcgcgccgataaccccacaaaaccacttgacatttgggtgtccggcgggtatgctcctattatacgcagaactgaccccatgaaaatacccagaacaaagtttttttatggggtcagtttgacgcaatacccagatgggagggacataatatggtacatctgaccacggcactggacccggcttcggcggtgccgctgtacgagcagctctaccgcagccttgccgccgagatgcgggcgggcaccttgacggcgggcacccggatgcccggcaagcggcggctggcggcagagctgtcggtctcggtgaacacggtggacaccgcctaccagatgctggcagccgagggctacctgaccgcccgggagcgcagcggcttcacggtgcaggagtatcttgccctgccgcagggggtgcagccgcccgccgcgccctctgcgccggtggcagcgcaccccgccgacaccgccccgccggtgcagttcgatttatctacccggggcgtggacccggggctgttccccttccgcacatgggcacggctgcaaaaggaactgctctattccgcgccggagctgctcacccccggggatgcccggggcgacgccgcgctgcggcaggcgctggcagagtatctggccgagtaccggggcgtgcagtgcgacccggagcagctggtggtgggtgcaggtctggaatatctgctggggctgctggcaccgctgctgcccggccctgctgccgtggagactcccggctacccccgcgcccggcaggtgctggaaaacaacggcgtgccctgccgctgcctgccggtggacgcggacggcctgtcgctgacggctctttccgccagcgatgcggcggtgtgctacgtcactcccagccaccagttccccaccggggtcaccatgcccgccggacgccgcgccgagctgctgcactgggcagcccgcgccccgggacggcggtacatcattgaggacgactacgactccgagttccgcttcgacacccgcccgctgcccagtttgcagggcatggcgggcgcagacggcccggtggtgtacctgtccacctgctcccgcagccttgccccgggcatccgcattgcctatatggtactgccccggcagctgctgggcgcgtggcaggccaagtaccggctgtactccggcacggtgggacggtttgagcagcagaccttggcgcgctttatcaccggggggtatttcacccggcacttagcgcgggagcgcaccgcctacaaagcccgccgggatgcgcttgtggcggcactgcgcacctcctttgcaccggaagagctgacccttgcggggctgcacaccggcctgcacctgctggcgcagctgaaagacccgccgccggacgccgccctgcgggcagctgcccggcagtatggggtgcgctgttccctgctgagcgactacgacctgaccggcacggcgcattctgccgccgggacgctggtgctgggttacggctcactgccggatgcggactgcgccgccgccggggagaggttgaaaaagctctgcaccgccgcccgggaggcatcggacaccgtatagtgtccgcctgcccacgtcccgggcagggcgtcagcggtgatatccaccggctcggcgctggtggctaaaaattccagcgtgcgttccagtgtagcaaggtctacggcggtcaggctggtcagcaggctgctgctcacctcccgcagaccctgcggcagggtggtgggcagcagctccagcgcctgccggaaaaacgcatcccacaccgccgcccgggcggcggcgctgcgccggggcgaaagagaagtgtcggcatccagtgccgctaaaaagctgtgggcatcggcggcagaaatgccctgcaccccggtgcccttgccgtaccgcgccagctgctccggtgtgagcgccccggtaaagcccacccgcactgcgccgtaccgcgccgcaagctttgtcagcaccgccggggcgatggcaagatagtcggtatcctccggcagagcgaacacctcgcccagcgcctcccggcagcgggcgggtcctgcggcggcgtaacagtccgcgagggggacgttcttgcccccgaagggcacttccagcgcggcgggcaccgccagcagatggatgcagttctgtccggcgttcaggtaagccagcacaaagcccggggtctcgtctgccacgcacagcagcacggtgcactggtcggcggctttgggcagacggatgggcaccccgctctggctttttgcagcctgccgcagactgctgcgcagctgggcgcggctgagcagcaccgtgccgctcaccagcggcagcagcaccagcagggcggcgcacagcgccgcccagaagggacgccagccgctgcgttttgcgtgtttcatggctctgcctcctttttgtgcataaagcatagcccaacgggcgaccctttatgcagaaaggcagggatgctgtatggatcaaacagaaaacctcaacaaaaaagaccgcgaggaacaggaggacttctggctgacgctggaaccccttcccgtccccgaccccgaaaagccctccgcaccgcatgaggattaaggctgctgcataggatacggtaaaaaggggggatgggatgccagagcggttcatgcgtgggatcgaggctttgaactgcatcgtgtgggggccggtggggctggggctgctcttcggcaccgggctgctgctgacggtgcgcaccgggggcttccagctgcggcggtggggctactggatgcggcacaccctcggtgccatcctgaccgaccggagcgtcaccgctcataccgcccgcgaggaacaggccatcagccagttccagagcctgtgcaccgcgctggcgtccaccatcggcaccggcaaccttgtgggagtggctaccgccatcctttccggcggggcgggggcggtgttctggatgtgggtcatggcgctgctgggcatgatgaccagctacgccgagaatgtgctgggcatctactaccgccgcaaagacccggcgggcggctggcgcggcgggccgatgtactacctgcgggacggccttggcggcaagccggggcgggtgctggcagtgctgtttgccgctttttgtgcgctggcaagctttggcatcggcaacctgagccagctcaattccatcgcaggcaatctgaacgcggcctttggcgtgccggaggccgttaccggcgcagtgctggcggcagtgtcggcggtgattttgctgggtgggctcaagcgggtagccgctgtggcggaaaggcttgtccccgccatggcgctgctgtacatcgtgggtgcgctcaccgtggtgggggtgcatatcaccgccgtcccggcggcgcttgccgccatcgtaaagggcgcgttcggactgcgtgccgccggtgggggcatcgtaggctatgggctgtcccgggcggtcacttggggcttcaagcggggtgctttttccaacgaagcggggcttggctcctcggtgatggtgcacgcggcttccaacgtaaaagagccggtgcagcagggcatgtggggcatttttgaggtgtttgcggacaccatggtggtgtgcaccctaacggcactggtggtgctgacctccggctttgtggatctggacaccgggcgcattgccgccggggcggtgggcagtgcactggtggggcaggcctttgacgccgtgtttggcacgctggggtcaaagctcatcgcagtgtgcatcctgctgttcgcctactccaccactcttggctggagctgctacggctgcaaggctgtggagtatctcttcggcgcaggggcaggggcattttaccgggtgctgttcgtagcgctgatgccggtgggcgcggtgatgcggctggaccttgcatggacgctttccgacaccttcaacggcctgatgatgctgccgaacctcatcggcgtggtggcgctgtccggtacggtggtgaagatcacacagaactacctcgcccgcaagctgcacggcagctccgcgccgccgctgtggtcggcgggcgagacgatttaaaatcgtcagccgcccccttgtcccggggcggggtttgtgctatgctaagggatacaagcgattttttgcgctgagaggaggagccccatggccgccgtaaaaacacggaataccgctacccttatgaccgagggcagcattgtaaaaagcctgctgctgtttgccctgccgctgatcttcggcaacctgctgcagcagatgtacaacaccgccgacagcatcatcgtgggcaattttgtgggcagcaatgcccttgccgccgtgggctccagcgggtcgcccatctacctgctcatcggcttcagtcaggggcttgccgtgggcgcgggcgtggtggtgtcgcagtatctgggcgcgggcgaccacaaggagacccgcgaggcggtgcacacctcccttgccattgcggtggtcatggggcttttgctgacggtgggcggcgttgcctgcgggcgcgctttgctggtggccatgaacacccccgccgaggtgctggccgatgccgtgacctatatccgcatctactttggcggggtgctgttcagcgtggtgtataacatgaccgccggcatcctgaacgccgccggcaactcccgccgctcgctggtgtatctggcatgggcatcggtgaccaacatcgtgctggactttgtgttcatcgtggggctgcggatgggggtggcaggcgctgccatcgccacagacctgagccagctggtgtcctgcgtgctgagtttgcgctttctgatgaaaagcgaggacgcctgccgggtggagctttccgccatccggctgcaccgcaaaatggcaggccgcatcatccgggtgggtctgcccaccggcatccagaacatggtcatctccttttccaacgtgctggtgcaggccagcgtgaacagctacggtgccgccgccatggcgggctttgcggcctacatgaagatcgacggcttcaacatcctgccggtgagcagcatcagcatggctgccaccacctttgtggggcagaactacggtgcggggcgtctggaccgggtaaagcgctcggtgtgggtcacccttgctattggggtcatctacaccctttgcaccggcgcggcgctattggccggacaggacgccattctgcacctgttcaccgccgacgaggccgtggtcacctacagcaagctggccatgcggtggttctgtccgttctacttcctgctcagcatcctgcacggccttgccggtgccgtgcgcggcacgggtgccagcatcccgcccatggtggtgctgctggtctcgctgtgcctattccgggtggtgtggatccagtttctgctgcccttcttctccggcatcgagggcgtgttcatcctctaccccgtcagctggggtctgggcgcattgctcatgatcctgtatgcgtggaagggcaagtggatggagtatcatacataacatttttacaaacaacgacccgccgcactgaaagagatgcggcgggtcgttgtttttcaggtactcctgtcggggcagcttaccatgcaaagcccacggagtccatgtcgatcttcttttccatcagccccagacggctctcgatgaagttgacagccatatccggccactgggcgatctgggtgtagtagtccacatagcccttggtgccagtgcccagacccacaccgtggggcgcatcaggtgccagatagaagctgaagtccgtgaagatatttgcgcactccggcagagagggcagcatcatcgcactcaggccatctttctgacccacaacaccaaagaccggaggcaggttggggttcttcgtgaagttcagaccagtgacgaacagtccgtagatgggaatcgccacattcaggtcagcgctctcatggtccacagcatcgcagacgtagctgggatagaccttatccggggtattcgtagtgccgaactggtcggccaccacctgcatcacattcatgccgccggcagagaagcccaccgcaatcatgatatcggtcttgccgatgtgtttttcagaggcgttgtggcggatgtagcggatagcgcgtgccagatccagctgctgatccacagcggcataagggttgacgcggcgctgcagcacaaaggcgttgtagccgttcttgttgaagaactcggccaccgggtagccttccaccacgttgttgcggtgggtgctgccgccgcctgcaataatgatcacgttgcccttcaccttgccctgatctcgcagcaggtacgggttcaggaagggacggaagccctcgttatcgtagcaattttcccagttggtgggcagcggagattccacggccatctgatctccccaaatttcccaaacggtgctcttggggtccttgatctggcgcagcgccttgcgggcattggtcagggcaacacacatatcgtagtgagaagcattgatgccgggcacagctgcaccgtccaccttctcgtactgagcgcgggacagcttgtggaacagcacatagaacttgtcaaaatcgccccggaaagcagccggataaaaggctacctcgcgggagagacggagttcctctgccaccatggcctgcacctcggcatcggtgtgcacgccagcgttttcagcaaaggatgcgggtgccatgccagccactgcgcccatggtcacggcagaagcggcggaaagcttcataaagtctcttctgttcatcatcatttctccttttaaatgcagacggctcatttgtgcagaacaaagccgcccaaagctgtgcagcaaacgccctgctgccgggcccgatagacattccagttgtatcacgccatcgaaatccgcacaaatcgtaccacaatacaatgcacttgtaaatagattttattgtttttgtgcgaaattgatatattagtatgtcagttcttgtgaaaatcaacaagcatgagaatgggtacaaaaaaggactgccatgcactctgcacggcagtcctttttatcttattacagcttttcaaacaccagaaagcggaaagcgatggtagtggtcagctgcggcagagccgcaaggcgggcagcaccgtcgcggggcgttttccagtagtagggggtcatggcaaacagggcttccagctgggcggcgggcacggtgatggttccctgcacctcccgctcatcaatggcgcggaagcccgggtactccacctgctgcaccgggtttttgtagggcttttcgtagagcacggccttcatctggtacagatgctctgcccccggcacaacgtagatcatgcgcccgcccgggcgcagcacccggctgaactcctcctgtgcaaagggcgaaaagcagttcagcagcacgtctgcccagccggtgcgcaccggctggctgaagctggacgccaccgcgtactgcgcggcgggcagcgcctttgccgccaaccgcacggcgggctttgcgatatcgaacccggccagctgcagcggtttttccgccgctgcgaactgctgcgcgatgcagcggtcgtaccagccctcgccgcagcctgcgtccagcagatgcagcggggcgtccttcgcggcgggcacgccgtgggcaaggcacaactcccccagcgcctgcccgaagatgccgtagtatccggcgttcaggaaggcgcggcgggcggcaaccatctccttgctgtccccgggggctttggtgcgcatgctctgcaccggcaaaagatgccagtagccctcccgggcgtggtcaaaacagtggcctttttcacatttcaaatcgttctccccttgcagcgcgccgccgcacagggggcactgccacggggcaaaggcttcgttctggctcatacttcttcgctgtggtcctcaatgggtgcggtagcaccgccgtgggcgtccatatactcctcaaagctggtatacttctgctggggcggacggcggctgatgagcatcagccccgggtcctcgtcccgggcggcggcactgcggccgcggcgggcaggttcggccttggcagcacggggtgcgctgccggtgcggttctggctgcctgcattgccgcgctcgctgcgggcagggcgggcgttattattctgggcagcggggcggacattgcgctgttcaccccgatcgttgcggtcgttgcggcggctgccgctgcggtttgcgttctggttattctgaggctcctgtgcgctgcggatggcgggtgctgccggagcaacaggagtcttgcgtgccgggcgcagcggagtagcctccggggcgctgacaaaatgggggtcaaatttgggctggacgttgctgcctcgggcgggggcggcattctcgcggcgggcgcggggcgctgccgcttccttgggggcgtttgcgccccggttgttggcgcggcggtcgttgcgggccccgcgctttgcgttgctgtcttgcatcagtgtttcctcttttttcggttttgcaggcaccgcgttctttgcagccttcggctcctgcttcggcgcgggcgcagctgcctttgcagcctttgcgggcgcagtttcggcctgttttttcggcgcttcggccaagttttccgcttcggggcggggctttttgccgcgcacgggcagcaccgggcgcaccggggcgggcacgccgtcccacgggtggccggataccaccgggatcttgcggcggttcagcttttcaatgcctgccagatactcctgctcctccggggcgcagaagctgacggcggtgccgtccgcaccggcgcgggcggtgcgcccgatgcggtgcacataggtctccggcacctcgggcagatcgtagttgaacacatgggaaagctcgctgatatcaatgccgcgggcagcgatatcggtggccaccagcacccgggtcttgccggacttgaaatcctccagcgcggtgacgcgggcagtctggcttttgttgccgtggatggcagcggcggggatgccctgctttgtcaggtcttttgcgatcttatccgcgccgtgcttggtgcggctgaacaccagtgcattgaccaccggcggctgcaaatttttgatgagccacggcagcaagagctttttgttgcccttttccacatagtacaggctctgctggatgcggtccacggtgctggacaccgggtccaccttgacaaaggcggggtcgtgcaggatgccggcagccagctgctcgatctcggcgggcatggtggcactgaacatcaggttctggcgctgggcgggcagctttgcaatgacctttttcacgtcatggacaaagcccatgtccagcatccggtcggcctcgtccagcacaaaaatttccaaagcggacaggtcgataaagccctgcccgatcaggtcgttcagccgtcccgggcaggcgatgaggatgtccacgccctttttcagcgcttccacctgcggagcctgccccacgccgccaaagatgacggtgctgcgcaatttcaggtacttgccgtaggcttcaaagctttcgccgatctgcaaggccagctcccgggtgggggtcaggatcagcgcacggacagcgcccttgcggcggggtgcgttggcggtgagccggtccagcatgggcagcgcaaaggccgccgtcttgccggtgccggtctgggcgcagcccatcagatcccggccagccagcaccggcgggatggccgctgcctgaatgggcgagggggtctcgtagcccgcttcctgcacagcgcgcagcagcggggcggacagattcagttctttaaatgtcatggttctcctattattctgtgatcttccggcactcgatgtagtagcgcttttcctccgcgtgtcccatgctgaaggtcttgcggggcagcacaccgcccatcacaacgccgcggaacaggtcgctcttggcgaagggcggcatcaaaaacgccactgcgccctgcttgcacaaagcgcgcacagccggctcgtcatgcacatagtccacctttgcttccgggtggcgctcgatataatccgaaataaaatcgtcgatggtgccaacggtcagcggctcggtggggtcctcaaagctgagcacattggccatgtgggggcccgccagcgtaaaaggctgctttttgctgccgccaaagcagcagcctgccatgttggaatcgctccatgtaatgaggctcagcagtacggtggcgcagtccacgttgaacagcacccggtggatgggctcaatctcaatagccggagaatgcacgttgcacacctctgccagacaccagcgggcggggtgattttctgcctgctccggggtcagggtctttttcagctcctcccagcaggcttttgcggtagccagcgagtggttgccatcgcccacggccagcgtcagcgggtcgcggcgggtggcatcggggtatttcttatcaaattcttcctgactgcccagcacggtcagcgcgttttcgatctgcgcgatgagggcggggtcctccactgcccagcctgccacatggccgccccccagcatcagctcgccctcgtataccttgggcaggctgtccttgtgggcggcaatgggctcgatgagggtgcagtccgggtcatccgccagcatcatgatatggggcgtttccagcgcagcgccggtgcgcaccttcatgcggggcgggatgcggctttccacggtgcactcgctggggcgcacggtgcatttttcgccccggcggtagctgtaagcttccaagtccacacgccctacaagaccctgccgcacccggccgctctgctcggtgcgctccacatagataaagccatccaccgcccgggtgagcacgttctgggcgtaatcctgcatggtggcgtggatcttttccacccgcgcgtcggcgtctccgtcctccagatacacctccggcaggatcaggttcagggtgctgggcgcacccgcagcggtctcttctgcccgctgccagtagctgcggtcactggtaaactggtcacaggcgatgcagccccactgctccagcggcacctgctccgaaggcagcaggatgtgtgcgggtgcaaaacaggtagtcggtttcatagtcgtttcctcccctctctatcaaagccgcttctcagcggaacgctgcggtatcatgcaccacaacgtgcttcacaccggcgtcggcagcggcctgctccagcgcagcgcggctgtccgcgtccagtgcggtgctgctggtgaccagcaggttttccatgccaagggacgtgccggtggtgccaatggcatcggtagcggcggtgcacagtgcgtccgggtagctgacccacagggtcacgctgcctgcaaagcgggtctgccatgcggcgatatccgccgtcagctgggcggcgcgtccctcccggctcttgccgccggaggcaccgaagtcctgcttgcgggtgatgatattggggaactgcaccccggtaagcaccacctgctcgtagcccatgccctgcacctcctcaatgaggtcgccgacatactgcaccgcgcttgcggcaaaggggttcatccatgccttgccgcccttggctgcgctgacgttgtccagccagaggctgttgccatcgtagtgcacgcccatgctgcggtcggtgtacaccgacaccgggtcggtaaaggcggcaagctgtgccgccgggataatgccctcctcccgcaggatggcggcgatattggccgcatccaccgggttttcggtgatgctctgggcagcagctgccacgccggaagcataatacaccgtgccagcggcgtccttcagggtgacaagggcgtagtctgcgccctgctgcttcagctgtcgggcggcggtgcggatggcggcttcatcggtcagggtggtcacgtccagctctgcccagctgccgccggtaatggccttgccgtccagcggcttttcctcctccggctccggttcagacgctgcctgtgaggcggcagcgctgcttgccgccgcagaggaggctgctgcctcggcgcgggaagcgctttcggcctccaagtcccggtccttgaccacggtataccatgtgtgggtggcccaatccagcacatggggtgcggcaaaccatgctgctgccagcactgccactaccagcaccacgatgccgatgccgcgcttaacgcgcatttcccggctgtaaaagctgcggtgataatgcttgaccttctgacgtttatacttagccatggtatcttttcctccctgtctgcattacaggatgacggaatgtccggtaaagccatagatcgccagcgccagcacgccgatatacaccagcgtgatgggcaggccgcggaatgccttggggatggctttgctgcgcaggcggtggcgcgcctcggtgaccagcagcaccgccagcacatagccaaggccgctgccaaggccaaagccaaggctctggccaagggtaaaggactgggtgcgctccaccagcaccgtgcccagcacgccgctgttcagcgcggccagcggcacgatgcgcagcagctgggcgcggcggggcaggctgcgcagcagccacagcaccagatgctccgccagacacaccacggcaatgctggcaatatacaccagcgggcgcagctgggcgcggttatccagcggggcaatgaaccgcccggcaagaaaagccaccggcgccaccagcacctgcgtgatgcacagcatcatgccgaacaaggcgctgctggtgcggtcgtcccccaccagctgcaccatgcgggacacgcccagtgcacgggtaaagacagcgttctgtgcaaaaatggccagcagtgcatagctgaaaaacactgccgagctgcttacaacttccttcacggttcgcggtttccctccttctggtagtgcacggtcagggtatcccgtgcttcctttttcagatattccttgcgctttgcagccgcagcgcgccagatggcgcacaggatgcccagcacgataaagccgcccgccggcatcttagccagcggcagcagcgcccagcgtcccaccggggcgccgaacacggtgccaaggctgagccactcgcgcaccacgcccaccacgagcagcagcagcgcgtagcccacggtgatgcgcacgcccttggaaacggccttgtgcaccgtctcctgcacgcggccgaagcggtaggtcagaagcggctccaccaccagcatgggcaggtagatgccaaggttcaaaagcccggtgccaaacacgaagttcaaaatgggatatgccgccaggtacaccacagcggcgctggctgcgtacaaaagtgcgcggggcagcagctttttttgcagctgctccggggtaggctcctcgtcccgcaggggcacaaggcggctgagcagacaggccagcacgcgggagggcaccagcagcagcgccaccgccgccgccagcatcaggctgttctggccggtggtagccacgaccaccagcggtgccagacccatgccctgcatgaccaccgggttattcaggaacacgcggtcgtgatgggcaaacttttcgggatcttttaaaatcagatccgcagtacgctttttcattccgcagcctcctttcgttcggacggcaggcggtgcagcagacggtacagccgctcctcggtgcggtcaatgagcgcggacacactgttgactgccagcagtgcaaagcagacgccggtctcgtacacgccgaaatagcggaagcccatggtggcgatgcccaccagtgcgccgtacaggatgcgcccaagccggtgatgcgcacaggtgtatggctcgttgagcaggaacaccgcgcagaacagcattgcacccgtgtgcagctcgtcccggacgccctgcaagcggggcatcaggctgctgaagagggtgctgtctgccagacctacctgccgcgggaagaagaaagcgatgagcccgcaggtgatgagaaagctcgctgatgcgccgatgtgcacgtccttctgggtccacagcacaaggccgcaggccagaatgaccagcgctgcgccggtgcccatgggggcggcaaactcgcccagcgcgatggcaagggagttcaggttcaggataccgccgctgcgcagggtatcctcgatggtgctgctcaccggcacggcagaggcgttccacaggggcagcggcgtatagggctgcgggtagcgcaccacctgctccggccacgataccgccgccacggcgtagcccacggcagcggggttaaaggggtagctgccgtagccgccaaagacctccttgccgatgagcacgcccgccagcactgccaccaccagcacatagatgtccacggtggcgggcatgagcagggcgatgatcaggctgaaactctcgttggagagatctttattggtgtacacccgatgacgcagcagcgccaccagacggtcgcacaggttgccggtaagcagggcgatgccacacagcagcagcggacgtgcgccgtagaaatagcaggccatgcacagcagcggcacacacagccagaaaacgtgctcgtagtaccggccggtcttttgcagctgtcgttcctgctcctggatcaaagcttcatccatatacagccctccttacaggctggtcagtgcgcccacagccgcagcggggtcggcagcgccgaacacggcgctgcccgccaccagcacgtcggcaccggcttctacgcacaggggtgcggtggcggcatccacgccgccgtccacctccagcaggtaggaaaggccgcgtgcttcccgctctgccttgagccagcggagcttgtccagcgccgagggcatgaacttctgcccgccgaagccgggctccacgctcatcaccagcaccagatccagctggtccagccacggtgccagcgcctcggccggagtgccgggcttgatggtcagacccaccttgcagcccagcgcacggacggcatcaatggtggcctgaatatcatcttcgcactccagatggaaattatacagggtcgcaccggccttgataaagggctcggcgtattgcagcgggtggctgatcatcagatgcacgtcataaaaggcatccggcagcgccttgtgcaggcttttgagcaccggcacgccaaagctgatgttgggcacaaaatgcccgtccatcacgtcgtagtgcagcatctgtgcgccggcatccagcaccatgcggcagtctgcacccagcttgccaaaatcagcagaaagaatcgaaggacttacgatggccataatatttcattacgctccgttatttttagcaatttttatcccatgtgttgcgcgttttgcagggttctgccgggcaaaaaatacgcgggcatggttatcttttagtttacatgaaaacggccaaaaaatcaaacccgcagccgtttttttcaccgaaaagtcgtaaatggcgcaaaaagtccattgcgcggcagcatctccatgtgccgcgcagctgccgccgaaggcttgccattttgcagcagctttctttgaagcaggacgatttggaatggcctccgcgttgctctggccatattcagcggaaaatagatttttaattccgcgtttgtcgcactctgcggagtgcgacaaacgcattttcacaagagggggtcacagcggtaagcagaatttttattccaacaacgccaaagcagccagaccgcccgggcggggcagtctggctgcggggtcttattctaccggcttcatgctggcgggttcctccactgcgccgggctgcccggcggcgtccggcaggcgcttcatgccgccggggttgggggaacaggtgggcagggtgaatacaaagcggcaccactcgccctgctggctctccacgcggatctgaccgccggacagattgaccagcaccttgcagatgttcagtccaaggccggagccgcgggcgtgcaggccgcgggagcggtcctccttgtagaaccgctcgaacacatagggcagcgcctccgggctgatgccctgcccggagttccagatggagatctcggcctcggggcccagcttttccacgctgaagcggatggtgccgcccgccggggtgaacttgatggcgttgtccagcaaattatacgccacctgatggatcaggtcggggtcggcgtagaccagcaccttttcatccatggtcaggccttccagctcgatcatgccatcgttgatgcgctgctctgccgccagtgccacgccggtcagggtctcccagatattgaacatccgggcgttcacctgatactccccgctttccagcttggagagatccagcatattctggatgagccgcgccagacgcccggtctcctcgctgaccagctgcagatagtggttctgcatctcgggcgggatggtgccgtccagaatgccgtccacaaagcccttgatggtggtcatgggggtgcgcagctcgtgggcgatgttgcccatgaactgaccccgggagttatcgttggactggatgttctccgccatctggttgaaggtgcgggcaaggtctgccacctcgccatcgccctccacgccctccacgcggacggagaggtcgccgccgccaaagcgctgggcggcatcggtcaccttctgcagcgggtcggtgagctgacgcatcagcaggcgggtcagcacgctggcgcacagcagcattacgcaggccgacaggaggaagtttgaccagaactgctgtttaaagtcggtgagctgcgcgccggaggagcacaaaaacagccagccgctgaacaggctctggtcgtcgatggtctccaccgccgcgatatagcttttttcggtcagtgcgccgcccaaatcgccgaaagcgtggtagtgccgggcgtccgggtcagccactgcgttggcgcgctggcagatatccagcggcacggtggtggtggtaagcttgtccgggtcggaggcaataagcacattgccctgtcggtcggtgaaaaacagatacgcctcggcgctctcgccgatgatctccagtttggtgttcaaagcgtccagctctgcaccctgcggcatggtctcgctgtttaccagatactccgcggtgcgcttggcaacgtttaccacctgatccagcgtttcgtagcgatccttcgcaaaataattcttgaacagcacccactccgagcagcccatcagcacgatgcccagcaccatcagggtggacaccatggagaaaaaggccgtggagatacttttacgcattactgacgcacctcgaacttatagcccacgccccagacggttttcagctcccacttatcggaagccccggccagcttttcgcgcagacgcttgacgtggacatcaatggtgcggctgtcgccgtaatactcaaagccccacacctcgtccagcagctggtcgcgggtgtacacgcggttggggtgggaagccagacagttgagcagttccagctccttgggaggagcttccaccaccttgcccttgacccgcagctcgtagctgttcatatccagccgcaggttgtcgaactcgatgacgccctcggtactctcggcggcagcggaggtagtctggcagcggcgcagcaccgccttgatgcgtgccaccacctcttttgcgtcaaagggcttgaccatgtaatcgtctgcgcccagctccagacccagcaccttgtcaaaggtctcgcccttggcggtaagcatcatcaccggggtgttgcccgccttgcggatgcggcggcagacctcaagaccgtccatgcggggcatcatcacgtccagcagcaccatatccggcttgaccgcgttgaacttttccagtccttcttcgccatcgtttgccaccgtgacctgatagccctccttggtcaggtacagccgcagcagctcgcagatgttggcgtcgtcgtccaccacaaggatcttttcgtttgccataggtatttcctccccttttatgcaggtttttgttgtatttgcagcccttccgggcgttttggcagtctcttactcttctattatacgggacagttatgacaaaataaagaaggaagtgtagtttttttcacatttctgcccggatcatttcaggattccttattcaagatagccctgcccccttgcgctggcggggttcatcgcgtataatggtagatgtatcgttatgccaaaaaacgtgtaaggagcgtattttatatgaagttaggtatcgtcggcctgcccaacgtgggcaagtccactctgttcaacgccatcacctccaccaagaatgcggaggctgcaaactatcccttctgcaccatcgagccgaactccggcatcgtggcagtgccggacaagcggctggacaagctggccgagatctggcagaccaacaaaaagacccccgccatcgtggagttcgtggacattgcgggtctggtgaagggtgcaagtcagggtgccggccttggcaacaagttccttggccacatccgcgagtgtgacgccatcgtgcacgtggtgcgctgctttgacgatgacaacatcatccatgtggtggaggacgtgaccaaggccgtggccgtggaccccattgccgatattgaagccatcgactacgagctgatcctctccgaccttgaggtggtgcagaaccgcgctggccgcatggcaaaagctgccaagagcggcaacaacaagggcgctgccgccgaggccgcttggctgcagcagctggccgaccatctgagcgccggtaagcccgcccgcagcttcgattttgaccccgccgacaccgagcagcagaccgttctgcatgagatgggtctgctgagcgcaaagccggtgctgtacgcctgcaacgtgggcgaggatgatctgatggagggcatcgagaacaacaagtacgtcccgctggtggctgcccgcgccaaggaggagggtgcccgctacatccccatctgcgccaagaccgaggaggacattgcggattacagccccgaggaaaagaaggcatttctggctgagatgggcatcgaggccagcggtctggacaacctgatcaccgccagctacgacctgctgggtctgatctccttcctgaccgacggcaagaaggagtgccgcgcatggaccatccgcaagggcaccaaggctccgcaggctgccggtaagatccacagcgacttcgagcgcggcttcatccgcgccagcgtcatcggctacgacgatctggaagccaacaacttcgactacgccgccgtcaaggccaagggcctgcagcgcaccgagggcaaggagtatgttgtgcaggatggcgatgtcatcgagttcctgtttaatgtttaaagttcttcccgtgaaaagtggaacctgaaatgcccgcgtttgcgcagcaatgaaagccccagtggggcttttaagtggcagagcggtctgcgtaagcagatggaggggttttaccccgacaagctccgcaggcggttcgggttcctgaattaaaaagaatcattcctctgaatatggccaaagcgcacgcggcggccatttttgatcgtaaaaggagcttaccatgatctttggtattatgggcgctatgcccgatgaagtagaccagctgtgtgcaaagctggaaaatgtcaccgttgagccctacggcggcgtggagtaccacaagggtacgctggccggcaagcaggtggtggtgtgctgcgccggtatgggcaaggccaacgccgccgctaccacgcaggtgctcattaccaagttcggcgcggagaagatcatcttctccggcattgcgggcaacatgaccagcaagatcggcatcggcgatgtggtcatcggcaagacggtgctgtaccacgacgcccagctggatatgatctgccagaacccgccgttcctgaaggaatacaccggcgacccggagctgatcgccgctgccgaagccgcctgcgccgaagccggggtaaaggcactggtgggcaagatcgccaccggcgatctgttcgtgggcgacagcgagacgaaggccgccattgaagccaagtgcgccccggactgcgtggagatggagggcgcggcggtaagccagatcgccgccaagaacggcgtgccctgcgtcatcctgcgcgccatgagcgacaacgccgacgaggacggccacgaggtactggtggtgaagaagttcagcatcagcgagtatgtcgccaccgccactaagatcgtggcagcgatggtggaaaagctgtaaacttccccaaaacaacaacagccagaccggcagtgccggtctggctgttttgcgtttatgtcagtttttggtcaggtctttggtatacagggcgcgggtggcgttgagcacggcaatgaccatcacgcccacatctgcaaagatggctgcccacattccggcaatgcccagtgcacccagcagcaggcacagcgccttgatgcccagcgcgaacacgatgttctggtgcacaatgcgcagggtgcggcgggcaatgcgcatagccagcgcgattttggcggggtcgtcatccatcagcaccacgtctgcggcctcgatggcagcgtccgaacccagcgcacccatggcgatgcccacgtctgcgcgggaaagcaccggcgcgtcgttgatgccgtcacccacaaaggcaaggttctccttgggctgcttttcagccagcagcttttcgatctggtccaccttgtcaccgggcaaaagaccggcgtggtactcgtccagacccagctgctgcgctacagcctgtgccaccggctgtgcatcgccggtcagcatgaccgtcttgcgcacaccggaagccttcaaagcgcggatggcatcggcgctgtggggctttaccacgtccgcaatcagcagatagcccgcgtagctgccctctacggcaacgtgcacgatggtgcccacgccgtccacggcgggcacggcaaggccaagcttttccatcaggcgggcgttaccggcggcaacggtcttgccgtccaccttcgcggtcacgccatgaccgcccagttcctgcacgtccgtgacccgggcggcatcgatgggcttgccgtaggcggccttgatgctcagggagatggggtgcttcgaccagctttccgccagcgcagcggcttccaccagtgcggcgtcgttcacgccctcgaccgggtggatgccggtgaccttaaaggtgccctgcgtcagggtgccggtcttatcgaacactacaacgccggtgttggccagttcttccagataggtagagcccttgatgaggatgccgcaggcggaagcgccgccgatgccgccgaagaaactcagcgggatggagatgaccagcgcacaggggcagctgataacaaggaaagtcaaagcgcggtagacccagtcgccaaagcgggctggctgtcccatgagcagcagcaccaccggcggcagaagcgccagcgccagtgcgccgtagcagacagcgggggtgtacacccgggcaaagcgggtgataaagttttctgcccgggcttttttcatgctggaattttccacaagatccagaattttagagacggtggactcgccaaattccttggtggtgcgcactttcagcaggccggtcatgttcacgcagccgctgatgacctcgtccccggcgttcacgtcccggggcaggctttcgccggtcagggcagcggtgttcagggcagatgcgccctccacgatgacgccgtcaatgggcacccgctcgccgggctgcacgacgatgacggtgcccacctcgacctcatccgggtccacctgttccagcttgccgtcctcgccctcgatgttggcgtagtccgggcggatatccatcaggctggcaatgctctggcggctcttgcccacggcaacgctctggaacagctcgccgatctggtagaagatgataacggcgcagccctccacatagtcgcccagtgcaaacgcgcccacggtggccactgccatcagaaagcactcgtcaaagggctgacggttcttgatgcccttcagcgccttgcgcagcacatcccagcccaccacaaggtaggggatgcagtagagcgctagctccaccggcatgggcaaggcgggcaaaagcttgagcacgatcaccagtgccacggcgatcagaatgcgctcaagggtctttttttgtttcttgttcataagcaacgctccttgttttgcggtgcagtgggtgaaaaacgggtggttttccacaagtttttcggcaaaaaatgggtattccacagttttacccgcgttttccacacagttttcctgtaaaaaagcgcttttccacgcttctttttcggttttttcgcaaagtgtgttgaaaacccggtggaaattgttgaaaagtggcggatttttccacagaaaaactcccccagtccacaccgaccgggagagctttgccgcacatcagatatcaaagatctcgcagtcgtcctcgaccttcttgcaggcagacagcacgttctccatggtggcgtgggggtcggcgccctcggcaaactccaccttcatcttctgggtcataaagctgacggtcgccttttccacaccggaaacggtgttggcggcatcctccatcttctgggcgcagttggcgcagtccacttcgatcttgtaggtctttttcataataagtaccagcctttcttttctgcgggcggtgtgcccggtcattcttcgatatggtccatccccatggaaaggatgctgcgcacatggtcatcgtccagtgcgtagaaaacggttttgccctcccgccggaagcgcacaagcttggagtccttgagcacccgcagctggtggctgacggcagactggctcagctgcacggcgtccgcgatatcctgcacgcaaagttcgctgtcgtgcagggcgtacagaattttgatgcgggtggaatcgccgaacacgcggaacaggtctgccagttcgtacagcacctcatcatccggcatctctaccggctgcttttccttttccggcgcggtctgttctagtccggtcatgctgtcctctcccttcgtttcgatatatgagcatctgttcatgtgttcatgataacacgcagacagccccctgtcaagcaaaatccgcaaagttttttacattgccgtaaaattgctgaaaatcgccgtaaaacgcaaaaaagatgcaatttaaatttgcaaatggggtgcgggttgggcagcagaacgatttgaaatggcttccgcttcttccgggttgcggcacccagcatccgcatcgtgccttgggcggcacttgcgtcttgctggccgctgccccaacaactcctcccctccccgtccagcagcacccgcaaaatgcgcagcgcgtagtccgtctctttggtgatgatcatgctccacatcctcttttcgcttgcttgttaataccataatatcaatcttgataaattttgtcaagatagtttcaaaaaaaatatcgctttattacagaccgccccagcccgggtcagcttcgctttccattcagcgaaaagccatgttccttacaattatagaagccgaaaaagctgtgccgtggcagtccgccgaaagcagaaaagactatgcctgaaaaccagaaagcggagaaattggttggggctcgcaggggtcgcccatccaaggcggatgaggcgatccctgacaagcctaagccatccaaccgaaacaagcaataaagtgcgtgcttttcattttatttatgccgatcattcttgggagacagtagaaaaatttccattgttattgacatgatgtgcgttacagagtaaagtattcatcaagactgattcgcaataaagaatatcatggtcgttccgtgatcgaggtcgttatgataaaaggaaatgtaaaaatagatcgcaaaaatctcatcagcatcctgcaaagctgccttgtgctgattttggtgatccttgtcgctctgatgatggtcgagatcggcaacctgaagggcacggcccgcgtcatcaattatgccgggctggtgcgcggagacacgcagcgggcggtaaagctggagatcacaggcacccgaaacgatgagttgatcgcgtatttagacgatatcttaagcaatctgacatccggagaagggcactacgaattggtaaagctcaaggacgcggcctatcaggaaaggctggacagccagcgtgcctactgggagcggctcaaggcggaggtcgcggcggccagacagcgtggatatgagaacacccaaatcgttgccatgagcgagacctattttgaaatggcggacgaaacggtgtctgccgcggaacactattcagaaaagatcgccatgaagatccgcactattgagatcctctcggcactggatatgctgtgcctggttatcctaatcatgctccagaccgccatggcactgaaaatggcccggaaaaaccaactgctggagcagaaggcatacatcgacatccataccggcctgcccaacaagggctcctgcgaggagcttctcaacaacagggaaattctccgggagcctacggcctgcgtcatatttgacctgaacaatctgaaaaccgtcaacgatacgaggggtcattcggcgggtgatcaactgatcctgagctttgcccggcttttacgccgggtgatcccggaaaagcatttcgtgggcagatacggcggcgacgaatttatggcggtcatttaccatacggaccggcaggaggtggagggcatactggacagtctgcgcagggaagccgacgctgcaaaccgtgacggcaatcagcttcctctcagctacgcctacggttgggcgatctccgccgattatgaaggctgcatcatgcaaacgctgctggacaaggccgactattgcatgtacgaaaataagcgagcctactacgccacccacgaccggagagcgccaaggccataaggctcttttcaaacgaaaaacagcaagaacgaattcgtcgccactattgcgaaaaaagcctggcctgacgaagaaaggacagggaggcggcactgaacgtccacgtcgcagttgtgatggaggtactgaaggctggtggcagcgtgcagttcatcagcttcgttagctttgaggtgaaggggtgcgctgcccgatctgccggttcgatggttggctgtacaggaaactcaccagcaggtactttacgatgaacgctggggcgaggggcggacgactatcttctttgctgcacaactgcaccattttctcatacacggacgatagatccagcactgccttacatttccggaggatggtctcctgctgcattagatactcgattaatccgccaagctgatctggccattgctgtaacgatacatagctgccctccaggtacaaggtttttgctggattttttccagttctcttgctccaattatacaacagattggcctctatggattgaaatataaggctttttcttttattcagtgcatattaagttaggatgtgcagtagatgctccattttagcgtttatctggagattgccaaaggataaatagaagcagtattatgatgagcagcttgccgcagaaaagcagcgcaccgagcgtgtgcccaagcgcattctgactgaggaagaaatgtcggctctgtccgatcggctgatgcaggtcaccaagggcatgaccatcacggtgcggtatttcaaagaggataccgcccacccggagattcccgcagtgggcaactacatcacgctgaccggaaaagcggaccgcatcgacccggtgttccgcaccttgcaagtgggcgaaaccgtagtgccctttgaagatctggttgagatcagtggggaaagcatcatggagattgaccaatatctcggcattacagaggattaagcacaaaaaaggccaccagtcgaaaaaacggctggtggtcttgcctacttatgatgtatcgtcggtaactgcttgactttgtttctgacttttttgcgttccagtgagaacaccatatctggagtacgttcaaaaaatcctatatcacgccgccagcttgtgccgcatttgcagtggaacagaccaatgaactgctgcttcattttacgtccgcagttcggacagattcgcttgctggcttccataaaaatttactggagtttggcaacaatttcatcagcggacataccgctggcaagcagcttcttcagcacatcttctgcttcgctcttctttgcttcttccattgcctttgcttcggcggcagcttttttgttttcggctttggtaagttccttggtgacggctttcaattctgctttcttggctttcatctgcgttttcagatcatcgagatttgcagtcagcgtagcaacctcagattcaattttttccttttcagcggtcttttctgcaacgacggctgcataatcaacgctggcctttacagtacgagccttattcttgcttcccttgggtcttgccataataatttcctcccataaagtgaaataatttgatacttacaagtatatttccaaatagtcagaattgcaataggtaacatgagccgttttcaactgctactgtgccacatcagaaggtagggcttcataatggcaagatacttatcgcgtgcagaactttcgtgcatatgcttcttgagaatccatctagtgaataccgacaccctccatgatcttttctatccaatttgtggaagaatcatttttaacagcctgatgcagtccatccgcagtgcgattcgtgggctgcaacgctggatcgcagacctgaacgaaaagaagcagcttcttctggacgctctggaaaagtcgaaggaacccacgttgtccgacctgctggtggattatttcaaccttcgcaacgagcagcgcagcgattggtcaggcaaggcaaaactgaaatgcactgtccgggactttgaggaagtcaagcgggctgttgattatctgaaagcccattccctgaacaccattgaggatttgaaccaagccattgacagcttaaaccagaccgctgctcctctccgcgggcagttgaatcagaacgaaaaccgtatgcggacaatcgcccagatcagggacgctgccgccgcccatgccaagcagaaacccatccatgacacttttatgaagaagaacttcaagttgaccaaggacgcttatgccgcccagcacaaagaggagctggacacctttaataaagctgtccgcaccctgatgaagctgaacggcagtacgactgtggatttttcggcattggatgccgaattttctgcgctgcaatccggcagcgcagaactgcgtaccaaactggaaaccttgcagccggacgtctctgccctgaaaaatatccgcaaatatattgacatggtgctgaataaacagcagctttctgcaccgggcggtaagatgccggagaaggaatcggtgctgaaaaagctggaagaagccaaggcaacgcaatcccagaagaaaaccgaacagaagaatcacgcacaggagctttaaggaggaagtagcatgacctacacccaagcccagatcgacaaagccaatgcggtggatctggaaaaatttctccgggcacagggcgaaacgctggtgcgcagcggaaaagaataccgatggaaagtccacgacagcctgaccgtctgcggaaacaaatggttccggcacagccagagcaagggcggcttgccggtggatttcgtgatggaattttacggcaagtccttccccgaagcggtgcagatgctgaccggagagccgggcgaagtccagccggagactgaccccgccccctctccggcgtttcgtttgccgctgaggaacgtcaccaacgccaacattctgaactatctgacacaggaacggaaactcagcccctcgctggtgaacttcttcatcgctgccggagatatttacgaggacaccgcccaccacaacgtggtctttgtggggcgggatgcagacgggcatccccgctacgcaagcagccgtgggattcaggaaaagtttcggcaggatgcagccggcgcagaaaaggcgtttggctttgcccaccgtggcactgacaagcagttgctggtctttgaagcccccatcgacctgctgtccttcatcgaactgttcccgaaaaactggcagcagcacaattatctgtcgctgggcggggtgtcgggcaaggcgggtgccgcacttgccacagaacagcttagtggtcagcagatagctcacatcctcttttgcaggccgaccgtgggcgatcttgttttgctcgaaacgctgctgcacccggtcgaacaagtccttgtcaacaatggccggaatgccgcccggtgtcacgatgtctttatagcggtactcgcctatgtagcggcggttccggaagatctggaagaagctgttcttcacgaacggcttcccggtgcgggtacgcagaccgcgctcgttcagggatgctgcgatcttctcggccggttcgccgtcggcataccggctgaagatttcctgcacgatgggagccgtctccgggtcgatatggtacagcctgtcctccttgccaatggtgaagcccagcggcaccacaccgccgttgtacttgcactggagggcgttttcgcgctcaccgcgcgccactttcagggcgagttcggcggaatagtattccgccatgccaatcagcatactctccaccataatgccttcaggcccctgcgagatgggttccatggcagacaccagatggacaccgttcttttccagctggtacttgtagttcacggcatcgaaccgattccgggcaaagcggtccagcttccagaccagaaccacatcgaagattttcttcgcgctgtcctttatcatcctctggaagtccgggcggtcatccgtcttggcggagtaggcacggtcgatgtaggtgccgaccacggtgataccgttcttctcggcgtagtccttgcaatcgcgcagctgtccttcaatggacgcttcgcgctggctgtcggaagaatagcgggcgtagatcacggcggtcatggttgcacctctcttcacacatcattttggcgatacttcgtataacctatataccatatttcacatcggtttgcaagatgattttaaatcgctgtcactgctcaaaactgtgaaaataatgattctgagcttcaaatataaaatagaaaagtggtggtgctcacggtgagcaccaccactttagaagaaagaagttcctttgctgcttgtgcgccttaacgcagcctttttgtcatcgtacaccatgcccttgatagtcatgccgcagaagttttctttgtcctgtgggtgtgctgctgcaatctgtgaatcctgttgtaaagcagcaatgcgggttttctgtttctggatctcctccgggaaagttttgagcagcttatcctccagacgatatttctgattctggaagtctccgcgcagcaccttcaattttgctacctgcacgtccaagtccatcttttcccggatgcgagggtcgcctgcacacagagccttgatttctgcgtaagagcagatacggagaacaagaaagcagaacttttctccaaggtacgcagcggacaggtgcgtgtgttgctgggcagcactgcaaagatgggagctggcaccaacgtccagacgctgcttgtggcggtgcatcatctggatgtaggctggcgtccgtctgatatgacccagcgcaatggcagaatcatccgtcaaggcaatcaaaacaaacaagtgtacgtctataattacgtcacggaatcgacatttgacgcctacctctatcagacccttgagaataagcagaagttcatttctcagattatgacgagcaaatctcccatgcgctcctgcgatgatattgatgaacaggctctgtcttacgcagaaatcaaggctctgtgtgcaggcgaccctcgcatccgggaaaagatggacttggacgtgcaggtagcaaatgtggttggcaaacccacactctattctacggggaggtttctctttgtctagggctaaagccgtttttattccaccagcagagctggtggttgtcgctcgctcaagctacccaacagaaaacgccgaggattcttcccatttgggggagagtcctcggtgttctttttcgttaaagaagcatttggcacaaatgcgcagcctgcatccggcggatgcagtacacaaagggtttgggactatcccaacaagcattttgcaacgcaaaaatggcgtttgtatatacggacgccctgcttgctggtacaatgtcatcgatgaaacaaaaatagtttcatcaaagacggttatatggttgtgccgatttccaacttcacgaagtatgtgctaaaatctcttgacagcacctcacaaaatatgttatcttttgtaaacatccttgaaaagatatgaccttttctggggaccgaacacaaaccgatttttctctggaggaaagacccatgaaacaggagatcatccgcaaactgagtgctgccgtggccatgagcctcgttgttggcgtctctctggccgcctgcggcggcggaagcagctccaccgccgctggtgtgactaagaccggctctgccgaaggctttggcggtgctgtcaccgccaccctgaccgtggatgccaacggcaccgttaccgactgcaagctggaaggcgcacaggagaccgagagcatcggcggcgctgcactggaagagctgtccaagcaggtcgtggccgccaacggccccgccatcgacggcgttgccggtgccacggtgaccaccaaggccgtccggaaggccgttgccgccgcactgggtgtggagctggccgaagaagcccccgccgactctgctgccgtagcccccgctgagcccgccgccatcgtcccggtggaaggcggcatccagatcggtcaagcctatgctgccgcccacggcaccaagtgcttcaccgaagcggtggctgtggtgaaggatgacgtcatcctcgccgcctacctcgacgattttcagttcaccagcaccgatgcaggcgtgaccgccgtgcccaactccgactccgactttgccgcaggctacgccgagggcaaggtgctgatgtccaagcgggccaacgccgattattacagcaagatgatggctgaaaagggcggttccacggtcgctctggatgcaaacttcgacgccatccagaactttgccgtcggcaagaccatctccgagctggaggatgtagccgccaagggtgccgaggctgtggacgccgtctccggcgcaacgctggtggataccgccggttatctctctgccatcgtggatgccgccaaaaacgcccagaccacgcaggccccgcgctccgatatggcggctttgccgcaacaaggggctgcaccccttgcgccgcttcgcggctatccctgcacacccacaaaaacagtacacccgccgttggcgtctgtaccatttttgcgggttttattatcctatccgggaggtgatacccatagccatttaccattggaacatcggcattgtgagccgaggaaaaggcaaatcagccgttgccgcagccgcctaccgaagcggcgaaaagctggaaagagaaacgtgaagaaaagccgaagcagaaccaatcggaattgaaacgttgtcaaaaacgctatgatgagctttctacccttattcgtagtctgtacgaaaatcttatgtctggactattgcccgagcgacagtacaagcagctgatggcacagtatgatagcgagcaagcagaattggaatcgcagatggaaacgatgaaatccgaaattgccgaagataaatcaagttctgctgatattcggcatttcatttcgctgattcgcaagtgcaaaaatccaacagaaatctccgattcaatgtttaacgaacttgtcgataaaatcgttgtttatgaagccgagggtgcaggcaatgcccgcacacaaaaggttgacatttattttaactatgtaggtcaagtcgatattgcttataccgaggaagaacttgccgaattgaaagcgcagaaggggcaggaagaacagcagcgcatggaaaagcaacgcaaacgtgaaaaagcctatcgagaaaagcgaaaggcaaagaaaatcgctgaaaacggtggcgagatcattaaaaccaaaacgtgtccgcactgcgggaaggagtttactcctacgagcaaccgacaacttttctgttcaagggaatgctggaatcaggcaagacaggagcaaaagaaagcagatagagaagccgaaagaggagattattactaccggcaacgcacctgtgccgtgtgcggtcattcctactggcctacacacagccagcaggaattttgttccgatgagtgcaggagaatcaaccacaacaagaaaaccttggaattctatcacaagaaaaaaggaaatccaaaacctgacccagaagcagccccaaagccgaaaccaaaggaggataatgcagcatgactaccttaaagaatccgctccacgacagcaacaacggtctggactacacccttgtcaacgactactatctgccgaacctgaccacagcagccccggcagagcagcaccccaccgagcggtggggccgcttacataagaaatatctgcaagaacatcatcccatccggtacaatcaactgctcctgtccggtgagctgggcagctaccttgccactctggacgaacaggcagacaagcagcttgcccttatcgtccgtcagatgcaggatagtgcggttgggtgactcaagagaaaggaaaaagagacctaatctcgtcaaaaaataaataatcagattattaaaggagtcattcaaatgaaacgaaatcaaaatttcgaccataatcactctcaaaaaatgctttcctgccactacaacatggacaccaaccgggtggaagaccggttcgcagatggcactacccttgccattgactgcatcgccatcgaggacgagtacggcaacactccggcacagcgggcagaactggactggctgctatataataagcccttggagtacgcccagcttgtgctgggtggagagatagaacattatctctcgcttggctgtgaccatggcagattagaagattgacctttaattaaaatacccgaagcaaaagaacaaccctctacttgcagtcgttgcagatagagggttattgttttgttagtattctttcagattcaaatgagatatacttgcttgatactcaagaaaacgaattgtccgatgttcgatatcaaaatcacttactcctcttgcgatggtaagttcccactggagtttagcacaattagaaaccatataacctgtttcctgttcaaaaaccacatatatgtatgaatctgaatctggaatattgtaatatggagcattttgatcggtatttcgcaaatgatacaaatgaaacttcaattggctagaatcagttatagctccattattgagaagacaatttagtgcattgtaattcaacatcttggcaaaagcatctgaaaaatccgtcaatttcacttcttctatatctacttttttatttagtcattcttgaagttcgccaacactaagaacattatgattagaagccatcgttatttaaccacaaccattccagaaaattcgatgcttgactgccatgttgctttggttaagttataggcttgtatattttgagaaattcattaattcaaccctccttatgcttgttcgcagctagtatcattccgccaaatgaaaaacttacaccaattaataataaatgctgagtgcaagaaatatataatgtagagcttctattcaagatgcctaatacaaaaacaatgaggtcaagagctgcaaaaacaaaaaatagcacacttccaatacttttgatatgaggccagtttttttcatttatatcaacaggcaaggaaaaacggaagccgtagtaactatggaacggaaaacttttatggaaaagaggatattccgcaggagcgtactttattataattccaattgcagaaaatattataaatgttggaatatatgagccgtctgaaaaaatcatatatagtccccccttttatactgttatcttcatcacatatttaggaaatagatagtactgccagccaaaacaaaacatcgtaaattgcgcaattatcaatcaggtgtattaattcgggtctctcccaaattttgtgtaaagtccagacagctataaaacaagagcaattttaatatggggcggcagacggcgaatccggctgtcgccttaataacaatataacgccggcaagggggaatgtcaagggtggcgaagccgttcatatacccttgacattcctccgcagcaggtgttaatccggcatacgatcagcgaaatagatggacaactgcgcatggatgcggctccagtcttgccgccgacccgtccactttttcgtaatatccatcatcgccagatacagcattttcagcagactgtcgtctgtctggaaaacgctcttggattttgtaaccttccgcagctgccggttaaagccctcgatcgtgttcgtggtatagatcagacggcggacttgcggaggatatttgaagtaggtgctgaggttcgtccagttttcccgccacgactttgcgatcttgggatatttattgtcccaattctgcgcaaaagtctccaaagcgtccagagcagcctgttcgtccactgctgcatctataaactgttcttcatcgctttgatcgtcaagaacagccaagtacagagaaagcaacacaaccacctccaactgattcgcaacgattggatgtaatgtaccacgaaccaacaaaaatgtcgaatgtcactaatgttgtaaaggagcgtgatgccattgccccaacccaaaaccgaccttgcctacctccgcaacgaaaaagccaaagcggagcaaaagctgcgctcttgtcagcaccgggagaaaatccttgaacggcagatgtcagagttgaaccggagagagcgtgtgcatcgtctttgcacccgtgccggaatgctggaaagctttctgatctgtccgggagaactgaccgacaatcaggtgatggaactgctgaaaatctcgttccgtcagccggaagtcgtgctggcgcttgcaaagatggtgcatgacgttcacgaacgcagcaacgtccaaaaccctttagaataaagggcgcaattatacaccgttccggtgaaattgcggtcttgcagacagctcgatgaaatcgaagctggcgtttgtgcgccagcccgattccatcccaaggaaaactgcattttccttgcgctgctttgcagctatccttttgcggctcccgcctaagaccgaagcgcatggcactccggtcttaggcggcgagcaaaaccgaatacgattccagaccgttcatcaagagcaatcttgctgggcggtctttttgtttgggggtgatgcctattccgtgtccgcatttcaaaattaccatcgtcaagcgcagccaagggcagtccgctgttgccggggcagcttaccaaagcagcgaacggctgttcagcgaatacgaccagaaaacgaaattctacaacaagaagaaagagcttgtccacgccgaaatcatgctgccatctcatgcgccgcccggatttgcagaccgagcaacgctctggaacgccgtggaagccgtggagaaccagtggaactcccagcttgcccggcgcatcgtgctggcgttcccggtggaggtgccgaaagaacagtatttgaaaatgattcgggaattttgtcaggagcagtttgtttccaagggcatgattgctgactttgccatccacgacaagggagatggcaacccacacgcccacattctgctgacgctccgggcaatggacgaacacggcaagtggcttccgaaagcccgaaaggtatacgaccttgatgaaaacggcgagcgcatccagctcccctctggcaattggaagtgtcacaaggaaaacaccgtggactggaacgaccagaagtacgccgaggtctggcggcatagctgggagaccatcaccaatcgctatctggaagctgctggcagaccggaacgtgttgacctgcgctcctttgagcggcagggcatccagcagataccgaccgtgcatctcggccccgccgcacaccagatggaaaagcgtggggtggaaacctttctcggtaacctgaaccgggatattcgagccgccaacagcctgatgcagtccatccgcagtgcgattcgtgggctgcaacgctggatcgcagacctgaacgaaaagaagcagcttctatgatctctggtcacaatgggaaccagaagaatcggagagcatactgattgcccacgcatccatccatggaaatactgcccatgcggcgaagaccctcaagggtaaattagagaaaaaaggcgtacaggtcaacatctgtgatctcactgtgacagatctttcctacgctgttgccagtgcgttctactgcgggaagttggttttagccagcgccacctatgacggagaactgtttccgcccatgagggagtttttggaacatttacggacaaagggattccgaaaccgccgggttggccttattgaagacggctcttgggcacctgctgccgcgcggctgatgcgcaccaaattggaggagatgaaggatatccacctttacgaaacggtagtgtctctgcgtggtgcattgaaccaaaccaaaaataggattactgcaatcgaatactgtatatcgtatcaaactgataggggtcagataacaaaacctttccattggaaactaccacaatattttcgccttcttcaatttgcgatagctgaatatttccttttaagtattccgaagctccctgaatgagatagtaatcatttgtaccgtacagttgattgggagcggttgcatagatagaattatcgcttaaatccacctttgttacagtaagttccgattttgtcctctcccacggatgcaacaggaaaccgcctataagaattgctagggccaaagctataccaaaagcagtcaatttcttacttgatttcgtcattttaagcacctcttcatcatagctccatttgaattttctgaacgtcacattttttccgaacgattgcagctataagaatcacatcaatggtatcatgattattggcttctctgtttgaataacgaattttaagcctgctttatttcatctgtccacaattcttttcaaaatcgtatagctgcacataaatttccagaaaacttgtagcacaatcacaatttttcttttcactcagataaaccaccacggcagttccagccacaggttatccatatcccccaccggcttgacggcattggtttgagtgtggtggatactgccggctacgttggtgtgctggtggatgccgcaaagtaaggcaagaaaaataacgttcctctgaacacagcagcgcccgccgggagatttcccggcgggcgctgcttatttattatactctgcatgagccgcctccttccttacgcaaacacgccgaacagcttcgccatccgggacagaagcataaacagctgtgagaaaagagacagtgccgatgcagttgtagtaagaaacgccattgtgcctctcggaaaggattcaaagtgccactaaattttcccgtgcaggcatctgtcccgccgctctctggcgtattccagcagtgcattgcatgccggacaaagcgcctcgccccttgtccaatgcacgccacaacaataccggcgcaccatgagggtaacggtttcgatttccttttccttgttcaagttctgaagtcctttctgttttatacatagttattcaattctaaccatctggtggaagaaaaggcagaccacctgtatgtagtctgccttttgcctgatgcgaaagcccgcagacacgcggggcttacagcaccagcgagggcgcggtgtagacccgtgccttcagctcgctgtttagcatatacagccccttgctgtcaccgccgaacagatccatcttggtaatgaggtcagcggcgttcttctcctcctcgccctgttccttgatgaaccagtccagcatctgcatggtgcggaagtccctgacctcgtatgcggcggcgtagatggcattgatgctggcggtgaccagcatctcgtgttccagtgcttttttcaacggggccatgtggtcgcctcgttcccactccggctttgcgatagcctcaaaggtgacgtcctcgccgttattctgcaaatactgataaaacagcatggcgtgatcacgttcctcctgcgcctagcctcaaaggtgacgtcctcgccgttattctgcaaatactgataaaacagcatggcgtgatcacgttcctcctgcgcctgtacccggtaccagttctcaaagccgtccagtccgacggcggcgtagtagttggcaaagtccagatatagataggcggagtagaactccttattgatctgctcgttgagcagaagagatacgttagcgttcatgatacttctcctccataagattgtcttttcctgctcccggcatgggggcagatataccgtacccagagcgatgctgggatgctcccttttcatctccaggaacacctgctccgccttgggatgctgctgcagctctgttacggcggccaatatctcctctgcgtattttggcgtaccgccaactctccaaatgcaagaatgaatcttattattttgcttttattatacctatatttttttctctgtcaacaagcacaaagggcttgtgctccaaaagctgcctcgaagccgattttctcaaattatgtgacgccgtcacagtaaaaccgcttgtcacgcggtatgaatatgggcgtgttcccgagtggccaatggggacagactgtaaatctgctgctttcagcttcggtggttcgaatccacccgcgcccaccaaacaagaaaaatccgaacctatttccgattggagaagggttcggatttttcgttttcttcgggtttgagaatgaaggctcccgtggacggcgtaaaactccgataccttgtcatagaccgtaaggtcactgggtagtatttagggttggagggtggtccccccatattccgaccaggtttcacgtgtctggccgtactctggaactcgctcagctcttgtcgttttcacctacgtggttctcacactctctgaccggccttcccatgccgttcggttaacaactcaagtcctaaatgcggtccgtaccccggaagtatttctacttccggtttgccctcttccgcgttcgctcgccactacttacggaatctcgtttgatgtctcttcctcgccctacttagatgttcgttttgattcagcacacgcttttctttcccatcctcctcgatggtatcataaacgcggctatcacgcaaattcaaggtgtcttccaaaatcttgtaagcattggccctgcgggtaccgtaggtttcggtggccataatgtcaccaaagccagtagcagatttattgctgattcgccattcggaagtgtaaggggagtagcgaacggtgatggcattgttgtagcggatacgatagggcggctgaaaagtttccatcatgaactgctgcacaatagagggggcaagccatgtggcacccagccgcacatcaatttcagaagcttccaaatctttgggctgcgccttagtcagtgcgtccacattgcccttgaactccgagcggctttctgcagcaagttgtgccatccgtagtttatcgcgcacattacccgaaaggtattcgtccgctgtttgccagccggcttccgggtcagtggggtcggaggcagggtccttgaagatcacaccggaaagttctgcggtaatgcgcccatactcgccgggcgtacccagcagttctgccatatagggtaaatccaccttgccgtgttctccgatggacaccgccagtgcttcgctgggggtatctacgctggtgacagtgcgctccgggcgaatggtgcgtttggtgaacatcgccgccttgctcttgagctgcccctgctcgtccagattttccagcgaacacagcagataatacgaggaatcctgctcaaacagccgcccatttttgcggtcgttcagcagaccgtattttgcggtaaaggcatcgtaggcaatgttcagctttgcctgtgtcgctttaatatccttgtccgggtagtcgttcaactgttggtcaatcagttcgttgacaatctggcgcagttccaccatgccggtgacacgccccttggcggtgtcggacagttccacctgtgtcatcacggaattttcccggtagaacacttcaccgtccaccacggtgtaggagaagttcttgacctccgggtcagccgggagaatatgcttctcattttcgacatccgcaatatctggtgtttccacctcaacttcggtgtattgcccctcaatatgctgtaccgcctcggcaagctggtcggcaaggctgatgccctcaaggggcgcaaccgtcagttcctctcgtccgtactgggtgctttcggtggagagtacgcccagaaccatctccgggtggtccacaaaatactggttgatggcaaagccatcctcggtcttgcccaactgcacccagtccggctcatggtcaatggggcggtcacgtttttgcaaaaagataatgtcgctgacaacatccgtgccagcattggcgcgaaacgcattattcggcagacggatggcacccagcaaatcggcacgctctgccatgtgtttgcgggcggtgctgtccttgctgtccatggtataacgagaagtcacaaacgccacaatgccgcccggacgcacttggtcgatggccttggcgaaaaagtagttgtggatactaaatcccaacttgttgtacgccttatcgttgaccttgtactgaccaaagggcacgttgccaacagcgaggtcataaaaatcacggcggtcggtggtttcaaagccagccacggtaatatctgcctgcggatacatttttttcgcaatacgcccggtgatgctgtccaactccacgccgtacagccgactgtcctgcagggtgtccggcagcattccgaagaagttgcccacacccatagacggctccagaatgttgccagcctgaaagcccatcttctcgaccgcatcataaatagcgcgaatcaccaccggggaggtatagtgagcgttcagagtgctggaacgggcggcggcgtattcatcctcagagagcagccctttcagttctgcgtattcctttgcccagttatccttatccgggtcaaaggcatctgccagaccgccccagcccacatactgcgaaagcacttcctgttcctcggcggtggctccacggtgttcctgttccaactgaaacagggtgcggatagctgcaatattccgggcgtatttctgctttgcaccgccctcgcccaaatgctcgtccgtgatgtggaagttcccggcaggctccggcgcaggaggttccgcttcaactgtgggtgattctgtgcttatcgtctgaattacaatgtcaaacggcagattgttttccttggcggggtatacggcaaccgttttttcagtacgaactggccgggtagaatttggttcgttctgccgcaagccctcctcgaattgttgcttattgacaacttcgttatcccatgactgcccgtgcgcactggtgtcgatgcgcacatccgtttcacccacatagccaacttttccctcaatagttcgagtggggagttcgaccacaacattgtcaccgaccttgtaatcgggcaggggggattccatcatatcctgctcctcgtacaactcccggacaagcgccagcggttcctcccggaaaactggtatccgcatttctgccagtgccacatcttgcagggtcacgctgcccttatcgaagttgaccgtctccacccggaaggaacgcccctccatgtggacgatagcacccagcggaagataatcttcccggcgcagatacttggtttggtaatgggtgccgtcctcattcagcccggcaaggtagacgttctcgccgcgctgccatagttgtttggcacggtacacccactggttactgggaaagccggtgaccgggacggtgcccagtgctgtttctttttccagaagtttgccgcccagaagttcgcagaccttccgggcatcctcaccgtagaactcatagtatccgttctgctcaaagcctaccagcgcatccgggtactgttccttcagagcgttgtactcggcggcggcatccagcggcagcagtgccgggcgttcctctgccttgctgtgatagtgctccagttcctcgtctgtgacgctgaccagttccgaaaaatccagagcctccaattcggtttcggtcagatcttccagactttcgtactggtgttcatctatcagcacctcgcccagataccgttccacccggtatcccaccaaatccacattaacttgaatggggatttcctcatcggtggcgttggtgtaggcaatgccgatcttggtcaggtcggagaagtctggctcggaatcgtattcttcctgacaaaactcccggatcaggtttttggcatgggtcagggtggtatctggctctgcgttgacgggcgcagggggcgtgtaatgctccttctccttgtcggtcaggtagcggtcagactgaatcatcaggtcgatgtatttctcgacctgtgtccagcttaacgtaactttttgatgatccgggtagtggtcaaattcaagtccttttccatcatgatttacaaaaccgctgctgccatccagaaaatcgtgggaatgcccaccgatgccgtactcctttgccagtgctttggcacggagtttgcggtcaggctgggtctggtacagcgccataatgcgctgtttgccgccggcaaaccctgaaccatgccgccgcagctcgttctcaatttcagcctgcgacaaaacaaaagcggagggcgttttttcgctctccgctcggtcgattttttcaatttgctgggcttcggtggggatgggcgcatccagaaaacttagctgtaaatcagctccgtcatcaccagttcctctgcctgcgctttcaggctgttcatgtgctgcacccacatcagttggttctgcgctttgtccggggccgggttctgcttcagaagttgctccatgctctgccgcatccggctctctgccgtctgctccacctccatcaggtgcgggtacagactcccgttcagaagcatcgtgtggtacagcaccgggcgatggttcatcagatacgtccggcgcagcctgccgtacttgcccagcggcttccggggctggttcagggtcaggttcgggagaaggtaatccccgacggtcgagtaggtcacgttcctgctgttcgtattcatattggctcctttctgcattgcggcggcgaatggttgtttttacggtgcgctcgatgttgcgcagcacctcccggctcatgtcgctgacggctgcgccgagggcgtaaacactatccggggtggagaaattgtagatcgcctgaaaatcgtccttgtcgaaccacccggcaggctcaaatccgcagcgttccagcagcgtgtaggtgacgctgattgcagcagcgcttttgaactgcatctccaccccggcttcatcataatccatcagcagtgaaccgtcaacgatggcacggatgtcctcgccgttgttgtcccagtaatctgccaccagtttccccgcaacgtccgcaagctgctggctgacacgctctccgctgatgccataggtggcggcgagcatttccgaaaccggctgtttcaggtcgtcgttgtactgccacacctccgggtcacgggaattgcggcgcaccccggtgtcgcttacgtcaaagacgtagtgcagacgcggcacactgctggactggtctaacagtgcgatgcccttggagccgcgccggacatagcggttcatgcgattgttccagatgtcgaagctggcgcaggcagtggcatcaggccgctgggcgtagatcatgagctggtccgcaaaagggtacttgtacagccgggatgcggtggtcaggtagtccgtccagctttcccagtaccgggtcaagccgttggccgtgcgctgggcaagtgcgaggtattcttcggttttgcttggcattttggcctcctttttcagattttagggtataaaaatagcgggcaaccgttttggggttgcccgctggaaagtgtatcgagataagattatttgttattgccctttatgtacttcataacgcagcaccccatcacgatgacgggaagcacggttcgtaaaccgaggtcgccgacccgcacatttacatcaatcacaagccctgcaaaccatgccgctaaagtgaaaacagttgcccatccgtaattcatagaactgtactccttcatatgtgaatattcaaaactctcttctcagcttcagctttcatagctgctcgcaaggaacttacatttattcgactcgaatgtttaccggattcagtgtaaggttgcctccgcccgccaccttataccatttgcctctttcgagtttgattctttccgttacgccctgtgtaatatatccgattctgtatttttctccagtctctacatcggtaaagaccacctcagtatcacaatcaccgctcacttttacagttccccaaagtggctgtatttgttctgtctttatggtgccttcatcgtttgaaagggtgaaagtatggcttctctggatattgatataaatcgccaccagaaaaaccgttgccagacataaagcaaaccttcttgttttcatcgaaacacctcctgcaaattcggttttatcgaatcatatcacataagcggactcttcaaacttacagctcagtttccaccgcaagctgctcctgcttttctttttcgtcagcgatttggacgtcaatatcttcgcgcatctttttcagaagtgcgaggactcgcttgatttgacccttggtgttttccaccctgctctgtgcctgattgatgtgatccagaactgcccagtctgcaaagaggccgtcaaagaagaaatccgcaaatttcagaaagctgtctaccgtgacctgaaggtctgcggtgatctcaacatcggcaagctcagttttgaaccgccgcagttccacttggagctgttcgatttgttcctgtgcatcgtccagtttctcatacttggcaagatcggccatcaaaccgccgcccattacgtcccatgtactccagccctcggcattgtcgagggtttccagaacttcattgaccgtatgcagggcggtctttccggcgttgatggcttccagcagctcccgtttttggactttcagcgcggcaatgcggctttcgctttctgcaacctgctgtgcggcagggtgggcagatgctttgatgcttttgattttttcggaaagagcagcttgatactgcctttcgcaatcggacagccgttccagtctattttgaatctgctccaagtcggcatcaacggaagaaagatcatggagagccgcatcgtacttgacacgggctgcataggcttcctgccgttccttgtccagcttttcatccatttttccgatcacctgatagaaaaatgcggcaaggctgtgtccctccagacggtccacatcagcctgctctgccagcttggatttttccagctttttcaggcgatcagcaagcgtatctctctgggcggtcagttctttctgttttgcttcgcagcttttcttttcagcgacctgctgccaaagctctttcaacgtagaatcactcatatggaatgtcctttcccggcattacgtttcttcgttcagaagctggttcaaaaaatgctgccgattatttacaaatgttttggtgataacgtagctgtccgtatcttcatactgacaaggatgaatcgtgccattgtcgaagctaaaaatttcagcatcaggcattccgaggagaatgggtgaatgtgatacgataatgaattgcgccccttcttgggcacaccgataaatgttgatcagtaacgtgagctgccgctgcggggataaagcggcttccggctcgtcaaaaatatagactccatctgcacccatgtagtcctgcgcaatggcgaggaaactttcaccgtgtgatttttggtgatagcctttggagggatgatcgtcatcggaatagtcgatttccttggtggctacattatagaaactctctgctcggagaaaatacccgaactttggtctgcgatatcccttggaaatcgtcatagcctcacatagttccgaatgggagttgtatgtggaaaatgaatagttcttcgttccaccctctgcgttgaagccgtaagcaacagcgattgcttccagaagcgtagattttccacttccattttcgccaacaaagaacgtaatgggcttatggaatgtaaaagtgtcgattccactgatggcaggaatctgacgaacataattgtatgggcgaactctgttccagtcgatggtcagcccttggataaatagatcgttcatacagcactccttattatataatgtaggagaacgcttagttccgctcaaacccaagatagcgggtgccctgaaaactcagctttccgatgtcgccctgcacgagcagaccataatcgcttccgtccacttcaaattccatccggtctccgctttctacctgaaaggtcacataataggaagtgtaggtgctggttctatatccatgtgcaccagacaaatctccagcatttgcagtgtcggaatgcgaaatatcagttcgctttgctactactgctgccggaatagatagacggggtgagtgattgtttttgttccatgtgcgaagatttgaaatcagcgtaaaaataaatagacacatcaatccgaaaaagataagtgggaatactatgctgaacacagcgttaaaccagccaaaaaacatattactcctccagaatttcttccagcagctcttttacatcgtccagaaaagattcttctccgagggtgttcaccttgaagaacaccgcttgactgcctcctgcggtgatggcagacagccgaaccggactgtccgcattttggaacatggtcagagtcagactcaggcggttgccgcccatcatgctgtaccgttcaaacacccgaacactgcaccgagcatcgccctctttgaaatcactgcctgcctccaaatctgccgaccaactgctgtctggaatttcattttccagcttccgaagcagcttgtcaaagtttttgtttcggatggtcttttcaaagattgccataatggttcctccgttctgacaattaaaaatcggtcccttatttttgatacgagcagagccacaggaaaattgcggagaaatcgcttgaagagaggaattttgtctaatttgattatagcatatcttttggaagaacaaaatactttatgtacgccgcccgcaggcggcaataatcagtccgggggaaattccaacttgccaaactccgcatcggtcaacagtttcagcttttcgataacaccttccgacaactcccgcagggcggtttcatcgggcatcaggtagcactgcatcagccgcagttcgtggataagtcccatccgggtgccggtgttgtagagcatcatcagcatgagttcttcatggttaaagttcatgcgcatccctcgctttccggcagacggtgggattgcactccggggcatcgcacttttctttgagattttgcaaaacagaggtacgctctggctttttatccagaaatcccggcagctccttgaagccgatgctgtccacataatgcacagacacctcgccattgcgtttgagtgcgatcacatcgctgaccgacaggctgtgcccctcaaaatcctgcggacgggagaggttgaacatctgaaatagttcttccaaaatctcgttgttcggcacatcttgccacatggcgggcaaatcagcatagtaggtgacctcataatgctccgggtctggcgttttgccccgacgatgcagttcccgcatggaagcaaatctttcatcgaggattttttcgtcatgccgcaactgcatcaccatataaacatcgcaccctgcgttcagaaatttctgcgggatgtctgtcatgggttcaccgtcaaaattctggttccatttttgctgcatcgtccacctcacagttccggtgcaggacgtgcagaggattttggcgcagacgtatcacttgccagtgctgccagcttttccagtgtggaagggcgatggtctgcactcagttcctcggcttccgcaactttatccatgactgcatcgtagtcctgtatcagccgccgacctttttccatgtgatgtgcttccagaatttcttcccggacttcctgaatcgtcagttccggggcagccaactgcccaccgtccatcacagaataatcgctgtggtagagggtgtagtcccatccatcctcacaggactggatggcaaggtagcctttgccgcccagttcccatgcagcctgctcgtcctgtgtctgaatctccgggtagaagtctgcatggtttcgttccatgacctcggcaaactggcagatgtggaacacattgcccagaccgcccatgtcaaagtgataatcatccagatgttccagccgtgccgtaaagctgcgcccatccgggtaatccacctgtacaactccgccatcgggaatgcggtagatgtcgtcatagtggctgttgatgagacgaatatccttcggcagcgtttcaggctcccagatgcgccgtctgccgataccagcttgcgggatgttttcgaggatctttacgctttcctgttggatgaccttgcggtcatcgtccgaaagttcaaacagataccagttccgggcggcagaaatggcgttcctgccatcgggcggcaggttcttttccgagatctgcccgctttccagcggctcaccagttaccttgttgtaggtggcaaaaccgactcctgcaccgttttcccggagatgcagatagcgttcatcgttgataaggtagaccgcttcttttatctgctccatcagcacccaccttcaaattccagcgaaaacttgctgcggccatcggcttcacaggacagcaggacggtggcattgtaggtcttgcccttggcgctcttgcagtccttcaggcggacccggccgtcccgcagcagcttgtccgccacatgagcgtccagccgcttgcccagacgcttgaagaacgcattgtccttccacagcacgaaacggcactccctgttctcacagaaccagcccttttcacgctccacaacatttgcaccgcagttcggacagacaccaatgattttgtttttcataagcgcattcgctcccttcgtagcctcggtggtcgttaccagcgaggagatcatctctttgatttcagtcataaaagtttccggctccatttcgccacgttcgatttgcagcagctttgtttcccagtcggcggtcatttccggggattggatttcttcaggcatcacagtgatgagggcttttcccttatccgtgggcagcagcaccttggttttcttggtgcccttgcgctccagaaagcccttctgcaccagcttttcgatggtggcggctctggttgccggagtgccgataccctgacgctccacgccctccggcatactgtctgcactggcggtttccatagcgtgcagcagggtgtcctctgattagagttgtcaaggtgggaagtggattttaaccacatttctttttcaggtcggcaatgataagccgcttcaccttgctttcagcggtttctgtgctatcgtgattaaaaaacacgctcaccagataggtggtacggccatccttcttcttaaaagacccgtcaggggtgaggttcttgttttcgggcactttcacattttccattcaattcctccttaaatcgtcattttccgaatttggctggcagactggcaactgtgggtgtaccatgattttcttgccagccaaaattttctgccagccaaatggcttattccatccaaaagacctttttgcggccttccacgatcttgcttttcagagcatcgcccagttcacgcttggcatcccggacagttcggccggggatgcccctttccagagccgccttgtcgatgtcctcgctgagcgcctgctttcctccggcaagcagggcacagatcaggtctttggcttgctgggtcttggtttcccgctgcggctcgatgccggacagcatctcgtctgcggtaatgtcgtactcgccgacccagcggaagccgccctcgtcccccagagagaacgccaacgacacgcccggcggggcaagggaacttttttcgtgcgttagaatgcgcatggtggggtcgtgcttcagcttgccgatgaacatgacactgcgcacggcagccgcaatgtcaatggagccgagacctcgctgcagactctgcattccagcggctttattcaggtgcccgatcagcaaaatagcgcagcccgttcgctgcgctacctgtcccagccgcatgaagatgggccggacttcgttcgccctgttcatgtccacatcggcaccgagatacgcctggatcgggtcgatgatgaccagcttggcgttattctcgatgatggctttttcaattcgttcatcggaaagggtgagctgcacctcgctgtcgtcaatgaccagcacccggtcaaggtctgcaccggcttcaatcaggcggggcttgaccgtatcgcccagaccgtcctctgcggtctggtagatcacgttgaagggttccatgcgctccatgttgggcagcagctttccgttggtgcaggcagcggcaaggtgcatggcaaagtaggtcttgccctcaccgggattgccttgcagcacgctgagttttccaaagggaagatacggtttccagagccattccaccggggtcagctccacgtcgctcatgcggatgatcttcacggaatctttcttcgggggctctttcagcacgatgcttttgaaataattgctttccaatggaaaggttttgttatctgacccctatcagtttgatacgatatacagtattcgattgcagtaatcctattttcattaaaggtcaatcttctagtctgccatggtcgcagccaagtgagaggtaatgttcaagctccccacccagtacaagctgggcgtactccaaagatttattctaacgaatgaatattctgcgctttaaacaatttaatgacgaatatattgtgcaatacagagaatttcaatagcggcttcgcgcttgattgacttgcaacgcaaaatgcgttacaataaaattgaggtgataaccatggaaaaaacaatgacacttaaccttcgtgtcaaccctaccgtcaagcagcaagccgaggatgtgttgaagcagctcggcatcccgatggcaacagccattgatatgtacctgcgccagatcaccctgactggcggcatccccttctcgctgtccctgccgaaggctcctgcggctctgaacgctgacaccatgaccgatgaccagctccatgcagccttgcaggtgggcattaaggagattcagaacggtgataccgtggatgctgcaagcgcattcgcacagttcagggaacagcacagatgaaacagtatgatgtgaaaatttcccggatggcactcagcgatatggagcagatttacagctacattgctgaccgtctgcttgaacctgatacggctatggggcagtacaaccgcattgcagaagccatccagtcgctgaacatcctgccggaacgctgtgcgctggtggaaagtgagccggagcgcacccaagggctgcggcagatgctggtggataactactcggtgttctacatcgtgggcggggatgccgtgtcggtggcccgtgttctgtacagtgcatccgaccttgtgcgccgcctgcggagaatgaagtgaaaggggtgtttgcatgaccgccgtgatttatgctcgctattccagcgacaaccagcgcgaagaatccatcgaaggccagattcgtgaatgtacggcctacgccgaaaagaacggcatcactgtggtcaaacactacattgaccgtgccctttccgccaaaaccgacaaccgcccggatttccagcagatgatcaaggacagcgaaaagcggttgtttgatatcgtgttggtctggaagctcgaccgctttgcccgaaaccgttacgattcagcgcactatgagtaccagttagagaggaatcatgtcaaactggtatctgccacggagcctatctctgacagccctgcgggtatcatggtcaagagtatgctcaccggcatggctgaatactactcggcagaactttctgaaaaagttgtgcgcggcatgaccgagaatgttctgaagggcaagtacaacggcggcacgattcccattggttttaaggtagatgaggagaagttctttcaagtcgacccgctgaaagctccctttgtggtagaagcctttcagcgttataacgatggtgcgaccatgaaggaactgatgaactggctgaatgacagtggcgtgaccaccaaccgtaaccagaagtttacctacaacagtgttcagacgatgctgacgaacaaacggtacatcggtgaaaaccacttcaaggacattgtgatgcccgacagcatcccggccatcgtggacaaggatttgtttgaggaagtgcagctgaaaatcaaaaagaacagccgtgctcctgcccgccacaaggccgaggatgattatctgctnnnnnnnnnncggaatgtgcggcgcgatgatgttcggcgagtgcggtacgggtcggaacaaagtcgttcatcattattataagtgcgccaccgcgaagcgtttcaagacctgtaagaaaaagaccgtccgtaaggaatggctagaagatttggtcgtggctgaaaccatgaagctgattcaggacgatgccgtgattgacgccatcgttgcagaggtcatggagttgcaggaacaggaaaacaccacactccctttgctggaaaagcagatgcgcgaggtagagaacggcattgagaatatgctgaacgccattcaagcaggtgtgctgaccaactccaccaaatcgcgtttggaaaagctggaagcccagcagaaagaacttgaggttcggatcgccgaagaaaaaattgctcggccacggttgagcgaaaatcaagttcgattctggctgacccggttccgcaagctcgacccgaacgtgaaaagccaccgggaaacgcttatcaatacattcgtgaatgctgtttatctctatgatgaaaaagttttgattgcattcaactacaaagacggcacaaaaaccatcactttcgatgaaatcgccgccaaagatgccccagagggcaatggttcggatttgggttgcttcgctccaccaagaactccggtatccaatgggtaccggagtttctgttttacctgccttgaaaaaggggctgcaagggtggattcgaacagcaacagcgacgaccgctgccagcggcagaaacagggaggagctgttggggctgcggccagcaggatgcgcgtgccgcccaaggcacgatgcagccgctgggagccgcgacccgggttcctttaatccacccgcgcccaccaaaaaaccgcaacgtatcaaaatacgctgcggttttgttttacgatactttttcctgctgtttctgcttcgccctcccatcagagcagctgtgcaagaatactgttttgcacaataagcccggcgggggtcagggcgagaatgcggccatcaaaggtggcgtacccggcgcggacacagttttgcacaaaggccagttgcgcggtggaaaactgcttgccgtacagggttttgtaggcatcaagatcgagccccttgcgcagacgcagctgtaagatcaggtagtcctctgcaccgcagttaccgtccatgatgggtgcggcggcgtcctgcagaaaggcggcggtgtccggcgcgtagcagaaccgcttgccgcccatgcaggagtgtgccgcagggccaaggcccagatagtcgccgcagtcccagtagatgaggttatgcttcccctcgtagcccggctttgcaaagttggagatctcgtactggcggtagccgtggtgttccagctgctccacggcataaaggtagaaatcggcggcttcatcgcttgtgggcagaccctccggcgggtgcttgccgaaggcagagtcaggctcgatttttaaaaggtaagccgagatgtgggttgcaccgcctttttcgatcagctccagtgtctcgtcaaactcggcctgcgtatagtggggcaatgccagcatgatgtcgccgctgatattctcaaacccggcacgccgggcagcggcaaaggctgcccgcgcctgcttggcgctgtggggacggccaagggtgcgcagctgggtgtcccgggcggactgcaccccgaaggagatgcggttcacccccgccgcccggaagcctcgcaggctctcctcggtgacggtctcggggttcgcctccaaggtgatctccgcaccgggcacggggtctgctgcccggatgagccgttctgcctgcgccggggtgagcaggctgggcgtgccgccgccgaaatagagggtgtccggccgcaggggcgcgtccggcgcaaagcggtgcagctcccgcagcagcgcgtccacataggcgtccggtacgcccagctccccggggtgggagtagaaatcgcagtactgacatttggaaaaacagtagggaatatgcagataaagtccaagggacatacaatatcacagcctttttcatgaaacgttcatttctatgcagtatactatattccgtagaccggagcaagagagaaatgctccgcagaatagactggaggaacccagatgagttataacaattacaaccgtggctatgcagagcctacaatgacctcggctgattatatgacccgcacctaccgctggatggcgctggggctgctgatcacctttgcggcggcgtttgtaaccgccaccaccccgctgttttatgtggtcaattcgctgtacctgctgttcaccattgccgagctggcgctggtgttcgtgctgagcgcccgggtgcagaatatgtccgtgggtgcggcaagaggggtgttcttaggctacgccctgctcaacggcatggtactgagctactatttccttgcctttgatctgggcacactggtgctggctttccttgccacctcgctgtacttcggtctgatggcagtctacggcaccaccacccacaaagatctgtccggctggggccccaaactgatgatggcactgtttgcgctgattatcaccggcttcgtcggtgtgctgtttggtatgggctttatgggcacggtgctgtattccggcatcggtctggtggtgttcatgctgctgaccgcctacgacacccagaagctgagccagatgtactcctactacgcaggggacagcgaactggccgaaaaggcttccatctacggcgcactgacgctgtatctggacttcatcaacatcttcctgtatgttgtgcgtctgctgggtcttaacagccgtcgccgcgactaagcgtatagcgctgcaacatcattgataagctggaaatcggtcaggcctgcgggtctgaccgatttttttgcgtaaaaaagggataacggagcatccccggatgctccgttatccctaaaattttagttcgatgctcaaagcatctttacagccagcgcctcggtggtgcgctcctgcgcttcggtgctgccgggcttatcgtccagaatgtaccgcagcaccagcacttcggctacatacagcaccgccaccttgatggggatgctgccggaatccagcgggctttcctgtgcgccgcacagcagcacgatgtctgccagctttgcgccgggggagtcctcgtagtgggtgatcaggatgatctttgcgccgttggccttggcggtgcgcagggtctccatcaggtcgcgggtagcgccggagtaagagacgaacagcaccacgtcctgctcggtcatcaggctggcagccatgacctgcatgtggctgtcggcaacggcgcggaacttgttggtgatgcaggcgaaccgggcgcagatctctttggcggcggccatgctgccgccctgtcccatgcagaacacctgccgggcgctgtgcagcagcgccacagcctgatccaccgcctgcggtgaaagggcattctgggtgccgttgatggcggtcatgaacagcgccgaggcgtgctcgcacaaagtagcggtgtcggcgtccggggcgggctcctgctggtttaccagcacaccggtggcgttggcctgcgccagcgcaatacgcatttcgtggtagccctcaaagcccagcgcccggcagaaccggaacaccgtggcctcggccacctgacactctctggccagcgatgatatggacagatactgtgcctccgcagcgtgctgcaccagatattcggccaccgtgcggccggattttgtcaggtcgccctgatgctgctgcagcagctcccaaaaatttgtagacattcttccctctcctgacttaggccgccggcgggtgccggtgccgtgttcgtgcttaccttcttatataaaagtataagagaaaccgcgccgctgtgcaagaggcgtaatgaacacattttacccgccgattctgtgcagagggcacagttttggaggaaaaaacgctccaaatagtgaaaatgcttttcatttttacaatttcaaagctgaaagtgattttcagaacagccggggaaagtgtaccattttgtaactattttgacaagtaaagtggatgaaaatattgtgttttttctgatatcccacaattttgtgcagactgccgggtttaaaaatgaaaatttatgaaaagaacgaatagacaaaatgaaaataattttctataattaggctacaaacaacggctgcggacacgagcagccgctacgagcaaaacggagtacgatcccccgatgggtcgaagaagatgaacaaggagaatctaccatgaaaaactgcatttcccgccgttccttcctgaaggctgccggtattctgggcgctgccggtgcactggccgcctgcggcggttcctcctccaccagcactgctgcttcctccaccgcttcctctgctgcaagtgcagccagcaccggcgcaagcatcaagctgtggacataccccatcggcggctggggcaatgacgagactgtccagaacctggtctccagcttcaacgcaaagtaccccgacatcaaggtgaccgtggagtatctggactacaccaacggcgacgatcaggtgaacaccgccatcgagggcggcagcgcacccgatctggtcatggaaggccccgagcgtctggtggccaactggggtgccaagggcgttatggctccgctgaacgatctgtggaccgacgacgccaagaaagacatctacgcttctgtggagtctgcctgccacaacgagaagggcgactattacgagtatcccctgtgcatgaccgcacactgcatggccgtgaacatgaccaaggtcaaggaagtgggcgcggacaagtacattgataccgacaagcacacctggagcaccgagggcttcctgaacactgtggacgcactgtacaagggcggctacgagaacgtggcagccatctactgcagcggtcagggcggcgaccagggcacccgcgccatcatcaacaatatgtacggcggcacctttaccgatgcagcccacaccaagtacaccgccgactctgccaagaacatcaaggccattcaggctctgtacgatgcaaagggcgtcaacttcgatccctccatcaacggcggcgaggagatcaccctgttccgcaacggcaccctgcagatggctttctgctggaacattgcacagcagctgaacgctgacaccgctgccgcaggccagaccatcagcggcgacgagatcttccccatggcattccccaccgaaagcggcgacccgaagctgtgcggcggcatctggggcttcggcatctttgataacggcgacgaggccaagatcaaggctgcaaagacctttatcgagttcatcgctgccgaccccgctcaggtcaaggacagcgtgctggcttccacctacttccccgtccgcaccagcgtgggcgacatctacgccggtaacgaggtcatgagcgagtacagcaagttcatgggctatctgggcgactactaccagatcaccccgggctggaccactgcccgcaccgagtggtggaacatgctgcagcgcgtgggctccggcgaggccgtcgagactgccgtcaagaccttcgtggacaacgcaaacgcagccgctgctgctgaggcataagcgctactttttctgaactgcatcacagctgaaccgcaaggccccttcctccgggtgagggaggggcccttttacggaaaaaacactctcaaacgaaaggtttggtgatcctcttggctgcaaagacggcaatgaaagagcccaaacgcagcagtgcgctggtacggcgcgaaaccttcgcctcctactgcttcctgctgcccagcctgatcttctttctgggcttcgtcatctaccccatgatcctctgcgtggtgaccagcttctttgactccaccatgaaccgcgcggatatctttgtggggatggcaaactacaagaccctgtttgccgaccccatcttccttggcgcattaaagaacaccttcgtcatcgttatcgtgtcggtgcccatcacctgcatcttctcgctgtgggtgtcctccgccatcgtagacctgccggagtgggccaccagccttttccgctgcgtgttctacctgcccgtggtcaccggctctgtcgccgttaccgtggtgtggaagtggatgtacaacaactactacggcatcttcaactacctgggcaagagccttggcattctggacaaaaacatcaactggctgggtgacgagcggttcgcgctgggctgtatcatcctgattttgctcactacctccgtgggtcagcccatcgtgctgtacgtttcggcactgggcaacgtggatcagtccatcgtggaggctgccgaggtggacggcgcgaccgacttccagtgcttctggaagatcaagtggccggccattatgcccaccaccctgtacattctggtcatcaccaccatcaactccttccagtgctttgcactgatccagctgctgacctccggcggccccaaccacaagaccgataccattatgtactacatctactacaccgccttcaagcagtacaagtacggctacggcaacgccatgggcgtggtgctggcggtgatcatcgccattctgtctgctgtccagttcaagctgggcaacaaggataattaaggaggtgcggaacaatgcgtgcaactgctgcaaaaaagcaaaaaccgttggagcgccatcccagtaaactgaaaaagatgagcgcctacgccattctggcgatcatcctcatcagcatcatggcggtgctgttcgccttcccgctgtactggatcatcaccggttccttcaagaccggcgcagccatcaacgcgaccaccccggagtggtggcccagccagtgggtgctgaccaactaccagaaactgtttgccggtaagcgtgccccgctgtggcagctggccgtgcccttcggctccaagttcagcgccaacggcgagcccgtctacttctcagtaggccccatggctcccgctgccattcgctggatgatcaacactgtgttcatggccgttatgtccatgatccttacctgcctgaccgccgccatggccggctatgcgctggccaaaaagcgctttgtgggccgcaagctgctgttcaccctcatcgtctgcgctatggcactgcccaagcaggtcatcctgatccccctgctgcgcgagatgagcgcactgaacctgtacaataccatctgggcggtcatcttccccatcgtgggctggccgttcggtgtgttcctgatgaagcagttcagtgagggcatccccaccgaaatgctggaggctgcccgcatcgacggcgccagcgaggcacgcacctttgtcaagatcgtgctgcccatggtcaagcccggtatcggcgcactggctatctttaccttcatcaacagctggaacgattacttcatgcagttgatcatgctgtccagcaccagcaacctgaccatctcgctgggcattgcaaaactgcaggcagagaacagcaccgacttcggcctgatcatggccggtgccgcactggccgcagtgccgatcatcatcatcttcctcatcttccagaagtacttcaccaagggcatcgcaatgggtgcggtcaagggctaaaattgcgacagcggcaagagggcaaaaataccccccgcccggagcaaaaagcctcagaacctgatacgaacgactattttatcttgaattattactgattgcaaagaagggcttgaaacatgaaagatatcaaaaaatatcagggtgtcatccctgccttttacgcctgctatgacgcagagggcaacatttcggtggagggggtcaaggcactgacccgccacctgatcgccaagggcgtcaagggcgtgtatgtgggcggctcctccggcgagtgcatctaccagcacgtcgacgagcgtaagaccgttctggaggccgtgatgagcgaggccaagggcaagctgaccgtgatcgctcacgttggctgcaacaacaccgccgacagcatggagctggcacgtcacgccgagagcgtgggcgtggacgccattgcctccatcccgcccatctacttccacctgccggagtacgccattgccaagtactggaacgatatgtccgctgccgccccgaacaccgagttcgtcatctacaatatcccgcagctggctggcacggcgctgaccatgagcctgctgaacgagatgctgaagaatcccaacgtggtagccgtgaagaacagctccatgcccacgcaggacatccagatgttcaaggatgccggtatcgccgcccgcggcaaggagggctttgtggtgttcaacggcccggacgagcagtttgtttccggccgcgtcatcggcgcagacggcggcatcggcggcacctatgccgtaatgccggagctgtatctggcgatgaacgcccatctggaaaagggcgagatcgcaaaggcacgcgctatccagtacgaggcaaaccgcatcatctacaagatgtgctctgcccacggcaacttgtatgccgtgcaaaaggagattttgcgccggatgtacgggctggaactgggcagcgtgcgcgccccgatgcccggcctgatccccgaggatgagcccatcgtggccgaggcacaggccatgatcgaagccgccatcgcaaagctgtaacaggataaaagcgcccctctccgtctctttttcagaggggaggcgggcgcttcttttattggaggaaacgcgaatgatctgcgataccttgcagcatctgggccggtacagggggctgcaccccaatttggataccgccattgactatctgcttacccacgaccttaccgccctgccgctggggcgcaccgaggtggacggcgacaaggtgttcatcaacctgatggacgccacattgcacccggacgcgggctaccacccggagtaccacaagctttatgctgatttacaggtagaccttaccggcagcgagggctggggctacaccaatctgcccggcgcggagatcggggagtttaccggggactgcggctttcaggacagtgccagcgtagtgaccggtgcactgggcgagggacgctttgtgctgttcttcccggaggagctgcataagcccggccttgtacagcacggctgtgtcagcgtgcgcaaggcggtcgtcaagatcagaatggaggagtaagaccatggataaggaaaagctgtttgcacagatcaagggtgggcttatcgtgtcctgtcaggcactggagcacgagccgctgtataccaaggagggcggcgtgatgcccctgatggcaaaagctgccgccatgagcggcgctgtgggcatccgcgccaacaccgtgcgggacattacccagatcaagcaggtggtggacctgccggtcatcggcatcatcaaaaaggattaccccggcacgcccatgtacatcaccgtcaccatgaaggaagtggacgagctggtggcctgcggggtggatatccttgccgtacagggcaccggtgcgctgcgcccggacggctccacttcggcacagttcatccgcgccatcaaggcaaagtaccccgagcagctggtgatggccgattgcgataactttgaaaacgccatgctctgcgccgaggcaggtgccgactttgtgggcaccaccatgcgcggctacactcccgagaccaccggcattgacgatatcgactttgacttcatccgcaagctgtccgcagagtgcccggcaaagatcattgccgagggtcacatccactacccggagcaggcggtcaaggcactggaagccggtgcgtttgcactggtggtgggtggtgccattacccgcccggcagagatcaccgcacgctttaccggtgccatcaacgctgcaaagaaataacacaggggagtgcctgctatgaaacactatcttggtatcgacatcggcggcaccgccgtcaagctgggcatcgtgaacgaagccggtgcggtgctggcgaaagccgaagagagcgtaagctttgacggctaccgcacccccatcctgaccacggtgctgaaggctgcacaagctttccttgccgcgcagagcgtcccggcggaaagccttgcgggcatcggcgtttctgccaccgggcagatcgacagccgcaagggcatcgtggcgggtacctgcggcaacctgcccaactacatcggcgcacccatcaaggcagaactggaaaagacctttggcctgccggtcacggtagccaacgacgccaactgcatgacgctgggcgaggtgtgggtcggcggtgcacaggactatacggacgtcatcggcgtgacgctgggcaccggcgtgggcggaggcatcctgaccggcggccgtctgctggaaggtgcgcggggtctgggcggcgagctgggacactaccgcacccacgcgctggacggcgtggactgcacctgcggcgcaaagggctgctgggagcgctacgctgccaccactgctctggtgcgcgccgcacaggaggaaaatccggcatggaaggatggccgcgctatctttgccgccgcagaagcgggcaacgagaccgtgctggcgctgctggacgcatggacggacgagatcgcgcaggggcttgcaggcatggtgcatatcttcaacccgcagctgatcctgatcggcggcggcgtgtctgcccagcagaagctgctcatcgagcctatcgctgaaaaggtgaaagcatccgtcatgcccgcctttgccgaagggctggaaattcgtgccgcgcagctgcacaatgacgccgggatggtgggcgctgtgtactacttccggcagacgatggaaaaggagtgatttggttatgaaaaagcatattctctgtctgggtgattccaacacccacggctactgcgccgaccccaacgactgcgccgaccacggcatccgcttcaacgaggacgagcgctggacctgccgcctgcaaaaggcgctgggcgaggagtatctggtcaccgaggaaggtctttccggccgcactaccgtgttcgtggacccgctgcatgagtccatggatgcgctgagcgtggcttacgccctgctcaagagccacgaggtcatcgacctgctcatcatcatgctgggcacgaatgacgtcaaggagcgctttggcgcaaacgccgcctgcatcggcgcgggcatggagcggctgctgctcaaggtgaagagcgtagactgctggggcggcaaggcacccaacattctggtggtggcaccgccctgcatcaaggacggcttccacgatgccgtcatgggcgcaggctgcgtggagaaatcccgcggggtcgccgagcagctgcgcatcgtagccgagcggcagggcgtgcactttatggacgccgccgagtgcgagttcaacgaggtggactttatgcacctgacttgcaagggtcacgcccggctggcagagctgctgaccgcagcggtgccaaagctggtctgagtaaaaagatgtcagagcgatcccggaaagtccgcagaccttccgggatcgcttttttatgcaagcaggggagaaaactcgatttccgggacagcatggaaaaggcgcgcggtaagagccgcttttttctgccatactgccgccttttttgttgacaaggcaccggcttgctattataatagtgtagtcaaaatggcattcctgtgcggctttgtggctgcgcgaaagaaatacagctaataacaaggagagattctcaaatggcacaagagatcaagatgtccgctgccggtctgaaggcaatgcaggaggaactggaatacctcaaaaccgtccgccgcaaggaactggctgaagagatcaaggaagcccgcagccacggcgacctgtctgagaacagcgagtacgacgaggccaagaatacgcagggtctggtggagaaccgcatcaccgaactggagcagaccatcaagaacgcagttataatcgacgagagcgagctgagcgtggataacgtctccgtgggtactcacgtcaccatccgcgagaccggcgaggacgatgccgaggaatacgatatcgtgggccgcaccgaagctgatgccttcaacggcaagatcagcgacgagagccccgtgggccacgccctgatgggcaaggctgtgggcgaaaaggtcgaagtgctgctgcccaccggccagaccgtggagtacactgtgctggctatcacccattctgcaaactaagtaggagtaaccatggaagagcaaaagagaaaccccgctgcgggtctgtccgagagcgagcaggtacaggtgcgccgccagaagctggccgacctgcaggccgccggcaacgacccctttaccctgaccaagttcccacaggacgcgtattctgctgacctgaaggaagaatttaaggaactgcccaacgagaccgacagcggcaagctggtggcactggcaggccgtatgatgtccaagcgcgtcatgggcaaggcaagctttgcccacctgcgcgacgacaagggcgatatccagctttatgtccgccgtgacgagctgggtgacgaggcctacgccgcctttaaaaagctggacgtgggcgatatcatcggcgtgaagggcgaggtgttccgcaccaagaccggcgagctgagcgtgcgcgccaccgagctgaccctgctggccaagagcctgcgccccctgcccgaaaagttccacggcctgaccgataccgagatgcgttaccgtcagcgctatgtggatctgatcgcaaacccggaggtgaaggacaccttcatcaagcgcagccgcatcctgaaggagatccgcgcttatctggacgagaagggctttttggaggtggatacccccatcctgaccccgttcgagatcggtgcttctgcacgccccttctacacccatcacaacaccctgaacatggacatggtgctgcgcatcgagaccgagctgtacctcaagcgcctcatcgtgggcggtatggatcgcgtgtacgaggtgggccgcatcttccgcaacgagggcatggaccccaagcataacccggagttcaccaccattgagctgtatcaggcctttacggatttccacggcatgatggatctggtggaggagctgtacaagcgccttgccctcaagatctgcggcagtctggtcatcccgtatcagggcaagcagatcgatatgagccactgggagcgcctgaccatggtggaggctgtgaagaagtattccggtgtggacttcaacgactggcagaccgatgcggacgccatcgctgccgccaaggcacacaacgtggagctgcccgaggttcccaccaagggcgccattctggccgagttcttcgatgcctttgtggaggacaagctgatccagcccaccttcatctacgattaccctgtggagatcagcccgctggccaagcgcaagccggatgatcccgccttcaccgagcgcttcgagtatttcatcgactgcaccgagtacggcaacgccttcagcgagctgaacgaccccatcgaccagaagggccgcttcgagcgtcaggtggccgagcgcaaggccctggagcccgagtgcaaggcacaggtggactacgactacgtcaacgcactggagtacggcctgcctcccacgggcggtctgggcttcggcgtggatcgtctggtgatgctgctcaccgatagtgcctctatccgtgatgtgctgctgttccccacgatgaagccgattgagcagtaaattcccaatttaagcaaaacaaagcctgaaacttcttgatgtactgagaagtttcgggctttttcttttgacggatttccagcgaaaactacgccatacgccaattttacgccaaacgatgtaggattttgtgcagagcaaaaagagcgttgttcgcatttagcgtaaaattggagcgtgtggtggatgggtgcagacctgcaaagggctgcatcacaaagcggattcatgaatctgcaaacggacaagccggaactttccaccgcagaagaagtaaatgtgaaaaacatggaggctttcttatgaacaaactgctttcctgcctctacaacatggacaccaaccgggtggaagcccggttcgagggtggcactacccttgccatcgactgcatcgccgtggaggacgaatacggcaacaccccggcacagcgggcagagctggactgactgctatacaataagcctttggagtatgctcagcttgtgctgagaggggagattgagcactacctgtcacttggctgtgaccacggcaggctggaaaatccatgacataacaaacacagccccgctttggcgaaggagaagccaaagcggggctgtattgatgaaggagaaatgaagggaatatcaggttacagattcagctcaaactgttccactgtaacagttgcttcgccatcggcagcaaaggcaatgccgtcggcagactggggggtgtagatccatgcggtcatggtctgctcgccatcgttggcgaaaacttcgatgctgttcttatccagcaggatgcggagcttgagcgcaccgttctggctgcgcaccttgcagctgcgggtatgcacgatgtcggcacgggaaccggcatagctgcgatccagcgtcagctgcgaggtgtaggggtcgtaggtcaggctggtgtgatggtctgcatcggcggccagcttcagggtaaaggagcggtattcgccgggctgcaccgtgacggtcaggtcggccacacggcccttgatgccttccagagaagtttcgccttgcaccgtcacattttcgtggaaagtgcgcttaccgtggacggcatccagctcccgcaccggggcctgaacaatgcggccgtccttgatgtgcagctcgcgcgggcagatggtctgcccgaaccacttgcagcccttgggcttatcctcggtgtccgaccatgtctgcagccatgcggtcatgatccggcggccatccggggcaagggtggtctgggtggcgtagaagtcgatgccgccgtccatcagctgcacgttttccttggtgaaagtgtgggtggcttcgtcgtagttgccgatgaaggcaatcacgttgtgaccgttgtggaactcgcccttgggcagcatctccatggggccaagcatcaagacctgcttgccatccagcggaaagaagtccgggcactcccacattttgccgtactgattgttgcagcgttccagcaccgtgacaaagtgccagtcgaagccgtccttgctctggaacagtgccgctgcgccgctgccgtcctcggccaggcagacggtgacgacagagtaggtgccatcggcctcacgccagatcttggggtcccggaaatcaaacttactgaagccttccggcagatccttctgggtcagcaccgggttgcaggcaggcttttcgtagtcgagaccgtcaccgatggcaatactctgggtctggatatcccgcatctccccattgggctgcttttctgccaccacgctggtgtacatcagcagctgcttgccgtcatccatctgggtggccgagccggagaagcagccggggccattgtctgccggagaatccggtgcaagcgcacagggcagatactcccagtgcagcaggtcggtgctgacggcgtgaccccagtgcatgggcgcccaccgcacatcgtaggggttatactgatagaactggtgatacttccctttataataagagaagccgttggggtcgttcagccagcccacataaggggtcatgtggtaagcagggcgttccgccggggaaatggcagcgccgtgcttggcctcgtaggcacgggctttgttcaaaatttcacttggcatcgcggatgcctccttgtcgctcaaaatcagacgttggccttgtagcggtcataagcgttctggtagacttccagcagcttgtccatgccgcagctgttggtcagggtgtcgaggtatgcgctccactcgtcatcagaggggccgccatccttcagccacaggccttcctgctcagagactgcattctcaaaatctgcacggtagcggtcaatggtgtccagttcctcgctggtgaacacgcagtcgatggggtaagtggtggtgtcgtccacaaagggcatccagaagtccttcaggtcggtcagacgctcgatggcgcggtcctccatgtagaagtacttgtcgtagtactcgctgaggatcagcttgggaccccagacctcgtaggtggatttcagctcaccggcacccttgttgtactttgccttggcctcttcctcggtgatagatttccacttgccgttggcgtcctgctcggtgaagaacacgccgatggggccgtactgcagctgcatcacggtctcgccgtcataccactggtcaaagaacttcagcaggttggcggggctctggcacttgttggtcacgttcaggttgccgctgttagtgccgccgccggtacgcacggtgacgttgtgagtgccgtccgggccgtccagtacgggcaggaacacatagtccttggagtaatcgcccatcagctcctcgatgtaccaccaggtggaaacgcccagatagccctgtgcgcccttagccagcagctggttggtatcctgactgaacatctccacgtccatcagaccctcggcgtaccagtcgtggaagtaggtgatcgccttgcggtagttgtcctcggcgcagacaaagcggcacttgccgtccttctgcagcaccagatcgttgcacacatcgttgggccagttggtgaatccgaagcctgcgtagaagatgttctgaccccagcaccactcgtcaaagccggtggacatggggatggtgctgccgggagcgttgccgtagaccttggcggacatatcgttgtctttgaaggccttcagggcggtgtgcagctcgtccagcgtggtgggcacttccagccccagctcgtccagccagcgcttgttgatcatggagaactgcggaatggtgaagatgctgtaatcctcgtcgtcaccgataccggcagtgcccatctgctcggcagcgggcagaccgtagatgcagccgtcgctcatggtgatagcggcgcggatgttgggatgctcgtccaggatcttggtcaggttgggcatgatctcggcgttgatatagggggtcaggtccaggaaggtgccgtctgcaccgtagttggcgatatcgtagttggagaagcctacacccataaaggcgtccggcagctggtcgcctgcaatgcggatgttcacctgctcgctgagggagtcgctcatggtctcgtaattgagtttaacgcccacgttatctgccagcttcttcagcacctcgttgtcgttgtagccggggctcagagcagactgaccgcccacgatgtcaaagctggtctggtcggtgttggagggatcgggtgcagcggcctttttgctgccgccgcaggcagacagtgccacggcagaaccggcaacggcgcaaaccttcaggaaattgcggcgagagatcatctttttcatggttgttctccttttctgtaatgttatatcaggttcttttcgttttctggaataggctgcggtcgtttaaaacctcttgcggtgccctgcatccgcttcgtgccttgggcggcactcgcgtcttgcagaccgctgcgccaaaaattgctccctgtttcggccgcaggccgcggtcgcaattttagcccttgactgcacctgccatgaagcctttttcaaaatacttctgtacaaaggggtaaacgatcagcatgggggcagctgccacgatgatggaagcaaacttgatcatttcggtcagcttattcagttctgcaaagccgcccgctaccatagaggactggctggcgctggtggagctcttgatcaggatattgcgcaacaccagcggcagcggagcctgatcggctctcaggtagatcagagcggtgaaccagtcgttccagtaggccaccatgctgtacaccaccataacggccataatggaacggctcagagggatgaccatctttacaaagacggtccacttggaggcaccgtcgatctcggcggcttccagcagttcccgggggatgttgttctcgaagaagttgcggacgatgatcacgttgcccacagccaccacaccgggcaggaacagtgcccacatactgcccagcagacccgtttccttaacgatcaggtaagtaggtaccagaccgccgccgaaatacatggtgatgacgaagaacagactgatgtatttgcgtccgggcaggtctttgacgctcagcggatatgccaccagatagatcatgaccaccgagtagatggtgccgatgacggtgtacttgatgctgttcataaaaccggagaacagcgcactgtctgcaaacacagcctgatagcccttcagggtgaactggctgggcagcaggaaggtcttgccggcgtacacgtcgtaggggtctgagaaggacgccaccagaacgtagtacagcggataggccacgatgagcatgacggcggcgcagatgaccaccagaacgatgtcgctgaccttatcggacagaccgccgggcttcttttgacgagatgctgcaatgttttttgccataacggttcgccccctttacacaaagctgacgtctgccgcctttttggcgatgcggttgacgatgatgagcaggatgatgttgaccaccgtgttgaacagacccacagcggtggaatagctgtacttggcgttgatgatgccctgttcatagacgtacacggcaatgatgtcgctggtggccttgttcagttcggtctgcagcagcagcaccttttcaaagcccacgttcatcaggttgcctacactcataatgagctgcagcacgatcatgggtaccagttccgggatatcaatgttcaggatacgctggaacatggacgcgccatcgatcttagcggcttcgtacaggctggtatccacagcagccagacaagccatataaatgatggtaccccatccggcttcctgccagatgccggatgccacatagatggtgcggaaggcggcgctctccgagaggaagtccacgctggtgcccaggatcaggttcagcagaccacccgaggggctgaggaaaatcttgatcataccacagatgaccatggtggagatgaagtggggtgcatacagcaccgtctgcaccacccgcttgaactttgcaaagcgcagctggttgatgcacagggacaggatgatggggatggggaaactccacagcaggctgtacaggctcagcagcacggtattcttgatcatgcgcacacagttgggtgcggtgaagaaccgttcaaaccagtacaggccgacccactcgctgccggtgatgccccggcttgccttgaagtcccggaaggcgatctggatgccgtacatgggccagtacttataaacgatggtcagcaccaccgggatcagcagcatcacatagagctgccagttttcccgcagccgttggctgaggcttttgcggtggaccgggatagcgtccagctgacgtgcagcagctggcgaggtctgcgtcataaaaactcctccttcttgtttttacgctgcccacaggcccgtgggcggggttccctgccgttcggggagcgttttttgtcgtttcccgtgaaacgttacacggcttgcaacacaaagataacacgccagcgtttttgtgtcaacaggattttacgcaaaaaatgccttgtatccatgttttcaacgttttgcacacttgcggtaggatgcttttgtgcaaaatgcatcatcgtgcgttcgtgaaacggttcatgaaatttcacgaaaaaagtctttacattctggaaaaaccatgctatactgaagttgcaagaacctcagagttagcaggaatacagcaagatttcctttgatatatatccacttgaaatagaaacgtttcacgaacaaaggagtggcccgcatggcaaaacagaacaccgcccctactatgaaggatgtggccaaggaggcaggggtctctctgggcactgtatccaaggtcatcaacggcatcccagtgggtgacgagtaccgtaaaaaggtagaacaggccatcaagacgctggactaccacatcaacgcctacgccaaggggctgaagaacaaccgcacctacaccgtggcggtcatcctgcccaatctgctcaaccctttctttagtatggtggcacactacatcaaccgggcgctggtgaaccgcggctatcggatgctgctgtgcgatacggaatacgactacaccaaggagcaggaaatggtgcagatggtggcgcagaacaaggtggatggcatcattgccctgacctacaaccccgacctgaagattcccccggatgtgcggtcggtgtccatcgaccgctatctcagtggcagcaccacctgcgtggcctctgataactacaacggcgggcgcttggcggcccagaagctggtggaaaacggctgcaaaaatctggcattcctgcgcatcggctccccgctgaccagcgagaccaacaaacgccgggacggttttgtggcagagtgtgaagccatgcagctgccctgcacccaaaagatcctgatggatgacgcgccgctcagtgagttcgagcactttctagaagagaacttgaaggacggacggctggcctttgacggcatcttttgcgtcaccgacaagctggcggtcgccgtcatcaagatgctgcgccggatggggcagcgcgtaccggaggatgtgcaggtcatcggctacgacggtctgcgcgcctttggagatcaggactactactgctccaccatcatccagccggtagaagccatggcagagacctgcgtggatctggtgctgcaggactcccacgctaacactccctccctgttgtgtctgccggtgcgctacgcctacggcggcaccaccaaggcatgaccgccccggaaaaaggccggtggtactggttcaaaaattggctgcattaccactggctctaccttattattgcggctgtggcgctttgggtcggcatcagctggctgggcaacgccctgcactggggcgaaaccctgccggactatcagatcgcctatgtgggcaaaagtgctctgccggaggatacagcccacgccatcgaagccgcttttgcgcagtatggcgaagatctgaacggcgacggaatcgtttcggtcaagctcaaccagtatgtcagcgacactgaggacgtggaaaacgcttctacttacgcgcttgccgcacagatgcagtttttggcggatatgaacgccgaggaaagctattttctgctgctggatgacccggcgcattttcagctggactatcaggcacttgccaactgggacggcactccgccgggcgacaacgactataccgccgccggaaagaccgtgccttgggcagactgcccggtgctggccggatacgaccttggaacgtatcagaccaccgtgttgggaaccaccgttactggcagcagcgcagaactggtaaacggattatttttaggccgcagggccttttatgaagagcccaagaacgaaaaagccgcccttgcccgggaaggagcacagcggctgtgggagattctgacggaaggagcaactccatgaaacggaactggttgtgtgttgtagcacttgcgctggcggcagttctctgtactggctgcggtgtgaaggatgaaaatttgaaaagtgatccgctggtaaatgcggatgggacggctccggtaggcaaaacgctggttgcccctgccccgccggaggacttcaccttgctggacaacaaggatatccttgccgccaacggcctgtactatgcttcttgggtcaacggagaaccccagccctatgaaaacagcgagggtaagacagtcgatctctatgatgcccagctgacgctggtggtacaggaaaacaagaccgaagaaaaggcagcttccgctgtttccggctggcaggagctggcacagcagaactacgatatttctgacacacagaccctgactgccgccgggcaggagtacactgtcattcagtttgcctatcaggacaagagcaacccctatgcctttggcgttgccgcctttggacagaagggcaccagtgccatagagtgggagctttcctgtcaggagagctacaccggcgatgcactggctgtactgaccgaatttctgaacggctgcacctattaaggaggcgtagaaatgggcttattctttccgagtgacccggtcatccatggtcaacgcgccactggtctgccccggtatcaggagctgctggaacgagactggaaaagctttctctttgcggattttgtcaccttgggtctgtgcatcccctatgggctgggggtggggtacgccctgctttcttccagtctgctggtgctgatcccggtctgcgtggtgggcggactgctggtggggccggccatttcctgcatgatggacgcgctgttccgcagctaccgggatgcgccccggggctggtgggaaaactactgcaagggcatgaaacaaaactggaaagcatcccttctgcccggtgtggtgttcagcctggcacttggcatcgagctgtttttcggcatggtgctgttctccggggagcgtctgcccggtatcggaaccatggctgtttttctggccgggctgctgattctgttcatgctgtttactgcgttctggccgcaggtggtattgtttgaagaaagcaaccttcaccgcctgcaaaatgccgtgctattctgcctgaaatacggcaagcacgttctgggtgcagccgtacttcagctggtatggtggctgctgtttgtgttgtttttgccgtggacgggctttcttgtgcctttcctcggtgtgtggtttatctggttcgtctgcttctttttgctgtacaacgatttcaatgccgcctatggcattgaagaaaagatcagccagcagttcccggagcagacaccccactatgatgaatgataaggagagcaaccatggacattttaacgattggcgaagttttgatcgacctgacccagaccggcaaggatgaaaagggcattcctcagtttgccgcaaaccccggcggtgccccggcaaatctggctgtggctgccgcccggctgggcgcacagaccgcctttatcggcaaggtgggtgcggatgcctttggccgctacctgaaagaggttctggaagagaacaaggtggacgtttccggcatggctgtggatgcagaccaccccaccaccatggctgttgtttcggtggatgccaccggtgagcgggatttcagcttctaccgcagtgccaacgctgacgtgatgctgtgcaaagaggatatttcggacgaggctctgaaagctgccaaaatcgtccacttcggttctgtcagcctgaccgctgacccctcccgtaccgctacgctggacgctgccgcccgtgccaaaaaactgggggctaccatcacctatgaccccaattaccgtgccaacctctggaagaacaaagaggatgccattgcccagatgaaggctcccctgccgctggtggatattctgaaagtgtctgatgaagagctgcccctgctcaccggcaccaccgactgcgaaagcggcacggcacaactggcacagaacggcatccggctgatttttgtcaccttgggtgcaaacggcgtattctaccgctttggggacaagaccggccatgtggctggcgtcccctgcaaggtgggcgacaccaacggcgcaggcgataccttctttggggctgctctgtccaagctctgcaaggaggatttgaacaccctgaccgtggacaagctggaaggcattctggcctttgccaacaaggctgccagcatcaccaccagccgtcacggtgccatccccgccatgcccacccttgcagaagtggagggctgaaccatggcaacaaaacaggaatttgagtcccggtttgccaagcacaaggacgaactggaatggctgttcatggaactgtaccacaaccgggaagggctggaagttctggagcgggagatggcagaagcctacaacgcccgcagtgccgagctgaaagcactggacaaggcgcgctctgccgacccggagtggtacaagcggggcaatatgttcggcatgaccatgtacaccgacctctttgccggaaatttgaaagaactggcaaagaaactgccctacctcaaggagcagaagctgacctatctgcacctgatgcccctgctgcagatgccccatccccacaacgatggcggctatgcagtggaggatttcgattccgtagaccctgcccttggcaccaacaaggatctggaaaacctgacccgtgaactgcggaaagccggcatcagcctgtgtctggattttgtcatgaaccacaccgccagcacccaccgctgggccatggcggcaaaggcgggcgacccgtggtttcaggcctattaccatctctatgacgaccgcaccatccccgaccagtacgagcagaccgtgccgcaggtgttccccaacaccgcacccggcaactttacatggtgcgaagaaatgcacaagtgggtgctgaccaccttccacgactaccagtgggacctgaactacgccaacccggcggtgttcgtggacatgaccaagagcattctgcaccttgcaaaccttggcgtagaggtgttccgcattgacgccgtgccctacatctggaagcagctgggcaccacctgccgcaatctgccgcaggtgcacaccatcgtgcggatgctccgcatggtgctggaatgcgtctgcccggcggtcatcctcaagggcgaggtagtcatggctcccaaggagcttgccgcctatttcggcaccccggaaaagccggaatgccacatgctctacaacgtgtccaccatggtcaacctgtggggtgcccttgccagccgggatacccggctgctgaaggcgcagctggatgccctgcacgccctgccggacaactgctggttcgtgaactatctgcgctgccacgatgacatcggctggggtctggacgaggcggtggaaaaacggctgagcatcgacccgcagaagcataaagaatatctctaccacttctacgagggcaatttccccggtagctgggcaaagggcgagctgtacaactacgaccccgccaccggcgatgcccggagctgcggcaccaccgccagcctgtgcggtatcgaacaggcactggaaaaggacgataagaccgcactggactacgccgtgaagcgtgatcttctgctgcacactgccatggcgtttttgcagggtttccccatgctgaactgcggggatgaaattgcacagctcaatggctgggactacaaaaacgaccctgaccgtgtggaggacagccgcaacctgcaccgcagcaaattcaactgggaagatgccaagcagcgcacccgaaagggcacactgcaaaaccagctgtggcagggcatggagcagctgcgccaaatgcgggcagacccctgctttgccccggatgcgtgggtgaccacatgggacagccacaaccccggtgtgctggcgctggtgcgcaagcgcggcgaggaaacgctggtgggactgttcaactttaccgagtacccggcgggggcaagtctggacgctctgggtggcgagtaccacaccccggaaggcacttccgtctggctggcggatgtggagctggaaccgtatcagtcactgctggtaaaaaacaaataagtaaaacgagccatccggctctctcttttcgccaaagttttcagagcattttctcgcaatctgccgaaaatggcgtgttctcaaaagttcgcgtttgcgaagcgtagcgcagcaatgaaagccccagtggggcttttaagcgacagaacggtcttgcgtagcaagatggaggggccttgccccgacaagttcacgttgacacactgcgatttttgtggtagtctatcccaacaatttaatataacatatttacttagagttccagctcggctcccgaaggagtcggagcaaatttttgactttcttatcgctacatagcaaacccgaaccaaggccatcccagaagggatggtcaggttcaggttgttgtgtggcgattttttattgccaaatccagcaccgcaccttgaaaaccgcatgaccgtctgcatgggatacccggcgatgaccctgagaaggagagccggaaaacgccgccggaagggggcaggaaagccatgcagggagaacggctaaacgttgattcctcagttaccagaaaacaatgtggtcaaattgaccacattgtttttctgtaacgccagtgaaaggagggtcatctccatgtatatgacaaacgaagaatggaagcagaacaatcaggattatttgaaagaatcgtatgaggaaacgggctttaccgccggaggatacgccgtccacaaacttatctgcggcggctgcggtcgggtgttctacaccaccatctacaccaagaaatactgtcacagctactggtgcggcaatcaggccaacaatctgcggcagcgggaataccgccaaatgcgccgtcaggatttggtctgccagtgctgcggtgaaaaattcacgcccaaacgtgcagatgcccgatattgcagcaactcctgccgacaaaaagtctatcgaaaacgtgttacagatgctgcaagtactcaaaatgagcacatcgtttttcgtaccgtctcaaggtctgttgaaaatcaggtgccgccacccggcacttgattttacccgtaacagaatcagttggtcattttggccaactgaaaaagccggacgagctgtccgttcaggacagtttgcccggagcaagagtgcagaggtgcgggtcgccagtggcgacctcaaaaggccgcaggtattttgaagcaccgaccgagccgacaggcgagaccgcagctctttgaagggagtcaagggggaacgccttgcccagtgatatgatgctgtgcgtcatatcctactgggtattatctggcgcaaaatggcggcagatccagcagctccgctgctgcgcactctcccggcaagctgttgaaatgaaagaagcctccactaaaccttataccaaaatcaggaaaaagtaatcaaaacgggttcacttaggggggacaataataggcctacgaagcccacgacttttgcaatttcaggtgctatgataattacagagatgcagcatcttaatgattccccgcaaagaaagaatagggatgcaacaagaaatgggaacgatgcttcctactttcaccgaaaattaggaactctcagttcctgttcgattccaagtttctctgttatacttttcttgcagagcagaagcaaactcttctaagcggaaagcgacaaacgccatgatctcccactgagggaaggagcggtaggccactttctttgcagtataacaaacacataaatccttttccgaaaggattacctctcgattccgagagaagatttcaagacacggtcttgaaatgcgagacccgttgcttagaagaattgtatcactcctgtgatttgatcgcacgagtggccgtacacaaaaaatacaggaaaagagggatgcctatctgaaactgacacgacacaacggacgagccggagcccacggcacttacaaccccaagcacaatgaccgcagtttcaaccttgccaacagtgagcacatcgacccggaacgagccaannnnnnnnnntcacggtttccgttcggctcttgacccacaagacctggacgatctggcggcaaccttctcggacgtagaacggcagttctacgaaacccactacacggcttttgtggaaagccagaacgagcgtaacgccaaaatccggcacacagagcgcaaccgctccattcccgacctgctgtccagccgcaagacctgcccggaagagaccatctatcaacttggaacgctggatgaacacgcttcggcagaggacttgctgaacatcgtcaccgagttcattgaggagttcaaggtcaagtatggcgaacacgttcatgtactggactgggcattgcatctggacgaaagcacaccccacatccacgagcgtcatgtgttcgactgcgaaaacaagtacggcgaggtggcaccccagcaggaaaaggcattggaagcactgggcttcgagctgcccgacccggacaagcccctcagccgccggaacaaccgcaagatcacctttgatgccgcctgccgaaagatgctgtttgagatcgccaagcggcatgggctggatcttgaagaagaagcggagtacggaaaccgcaaatatctggaaaagcaggacttcattcttgccaagcaaaagaagcagcttgccgcccagcagagcaagctgaacgagttgaccctgaaagtttcggacatggagaccctgctggaagatgtttcagctgcggcctacgacaaggcggtggaggtcgtgacggacgtggtacgcaccgagacccgcacggaagatatgcggatgatcgaggacacgaagaagtgggtgctgtccccggaacgcaaggctccgcagtccacgagagagtatgccgcccatcggttggacaccgtgctggacaagttcctcaagactatgcagaccaccgctacacgtctgcaagagaagctgctgaagccggaagttcggcagaaaggcaaggaacaggtcaaggagaaagcacgggattccgttctgcaactgctgaatcgcttgcaggcagaacaggcacagcggaagccatctgtcccgcctaccgccgaaaagtcagaaaatcgttttcaatcatagtacgaggtgatgtttattgagcaaagaagtcaacgaagaacgtgctccccgaaccgttgaagatgtgaaggaaatgctgaccaagcactccaacggagagatccagcggacaatccaaaactgcatcacgattttgcagaacgaccatgtgcttgccgatgccatccggctgaacctgttgagcgagcgcatcgacatcgtaaagcctgtgggctggccccgctccggcaagaccctgaacgataccgacatgaagtatatcctgcggagaatggagaagtacggcatttccaacgaaaagaagatcgaatccgccattcgcatcgttgccaacgagaaccgctaccatcccatccgggactatctgaacggcctgcaatgggatggaatagagcggatagcccacgtcttgcaccacttcctcggtgctgcggaggacgagtacacttgcgaagccatgaagattttcttgctgggagccattaagcgcgtgttccagccgggatgcaaatttgaaaccatgctctgtctggtgggcgggcaagggtgcgggtcgccagtggcgacctcaaaatgctgcaggcattttgaagcaccgaccgagccgacaggcgagaccgggaaagtccagcttttttcggctgttggcggtcaaggacgaatggttctcggatgacctgcgtcggctggacgatgacaacgtgtaccgcaaactgcaagggcactggatcattgaaatgtcggagatgatcgccaccgccaatgccaagagcatcgaggaaatcaagagctttctcagcaagcagaaggaaacctataaagtcccctacgagacccatcctgccgaccgtctgcgccagtgcgtctttgctggcacgaccaaccggcaggattttttgccccgtgaccgcacagacaaccgacgttttatccccatcccggtggatgcagaactggctgaagttcacattctggacaacgaggaggaatctcgtgcttatatcgaccagctctgggcagaagctatgacgatttacaacagaggcgactacaagttggcattcagccctgccatgcaggaaacgctgcaagcccaccagcaggacttcatgcaggaggatgcgcaggcgggcatgatctacgcctttctggaggactacacgggtgaccgggtgtgttccaagcagctttacgcggaagcactgggcaacaccaacattccggcagaatgggagactcgtgctatctgcgagatcatgaacacgggaatttcgcgcggcgatatccaaggctggcaggcgcacaagacagccaagcgttacccgaagtacggcgttcagaaaggctgggagcgcgtaaccagccccgaaaccggggctgaagatttctccgaaatagcggacgcggaagccaagcagctgggatttcccttttgatggacagcggttacacggtcagttacaggtttggttacgctgcagttacagcgcaaaaactgcatgattgctgcgttttccgctttctgtaaccatgtaaccttaaaaagagaagaaaaagtataaagcccaccgaatgccctgtgtgcagaaaaagagagttttcctgcccggttacaggcgttcggttacaaggaattggaggtctgcctatgaaggaagttcgcgtttgcgaagcaatgaagtccccagtggggactttaagcgacggaacggtcttgcatcagcaagatggagggaccaagtcccgacaagttccgatttgggaaaagagcaatctgacgctggaagaagctgcggcttattccggcattggcatcaacaagctgcgttcattatcggataacgaacattgccagttcgtgttgtgggtgggttccaagcggctcatcaagcggcgcaagctggatgaatacacggagcgaatgtactcgctttgaaaatgtcccggatatttttcaaaacgtcttgcagagaatggcgtatctgtggtactatgaacacagaacaacgctcttttctgtaccgcaatgtagaaaggagcaacgctcatggcaacaaatcagaatacgaaacgcaaggacaaggcgcgtgtggttctccgcaaaggggaatcccagcgcaaagatggcaagtacgatttccgttggacttccccggatggcaagcgacattctatttatgccgcgaccttggaggagcttcgggaaaaggaaaacgacattcagcgagattcgctggaaggcatcaaggcagaagcacggtacgtcaccctgaacgatgtgttcaccctgtgggcaaaggtcaagcgcggcctgaaggacaacacttttcggaactatctgtacctttatcggcagttcgtggagccggatttcggcaaatcgaaggtgtctgcgctcaaaaagtcggatgtgaagcagttctacaacacgctggcagacgagcggggcttgcaggtctctacgattgacagcgtacacacggttctgcatcaggtgctggacatggcggtggatgactgctatctgcggagcaatccctcggacaatgttctacgggagctgaaaaaggcacaccagtttgaaaacaaccgccgtaaggcgctgaccgtcgcagaacagaatctgctgctgtcctacctctccaaaacgccgaagtaccagcactggtatccgattttcgcggtcatgctgggaactggtttgcgcgtaggagaagccaccggtctgcgctggtgcgatgtggatttagaagaaggcacgatctccgtcaaccacacgctggtcaactacgaccgccgtgagaacaacggcggcaagaagggctgctacttcaactgccactcgcccaaaacaaaggccggtgtccgcactgttccgatgatggacttcgtgaaagaagcctttgaaaaggaacgtgcctatcaggaagaagcagagatccattgcacggtaacggtggacggttacacggactttatctttgtcaaccgctttggagagtgccagcatcagggaacgctgaacaaggccatccggcgcatcatccgggactgcaacgatgaagtgctggcgaagaatccgaacagcactgtactcctgccgcgtttcagctgccataccctgcggcataccttcacgacccggatgtgcgaagcgggcgtgaacatcaaggtgattcaggatgcgctgggacattcggatatctccacgaccttgaacatctatgcggatgtgaccaaggaactgcgtaagtctgaatttgaaaatcttgaccgtcagttcgcacagtggaaagaccctgaagaataaaataaagcatacgccaaatacgccatacgccatttacgccaattcatacgccaaacgatacagttcggataaaggcttgtgtagagatgtaaatgaaatggcaaaattcaacccttgcggtgtagagtagtatcaagaaataaaggcttataactgctcgtcgatgacatccccacgatgaagccgattgagcagtaaaatacaaaattaaaacgcagatacgacgaaattttgaacagatttcaagcaacatctgcggtgctacaccacaactacaccaattttgggacgttttcccgaaaaggagccttacaaagcggtgtggtgtaagaattgaataggtggattggtgtagtaggtacaccgaacccgtaaagacgaaaaaggcaggtacactatggaaacatggtgtgcctgcctttgtgcttattattgaaagataatacgagaaagttgtggaaagaatgttacaaatgcgataagctttaattaagaaaagtcgatgtgcaacaatcatcaaatgtacatcaacaaccatgattcatggcagggagcttaggacacaaaagttcatccgatgcagttttctatgcatccgatgaacttttttcagtagtgtttccttttaagccaccttggtctttcgcagatacccccatgctgccaatccaacgagcagaacgattttgatcggtgccgatgccagcagtacatctgcctgaaagaaggcatgcccgcctgcatagagaaaatcaaagctgatcattttatacagcaatgcattggaaagcccaatgccccctgccggaatcagggtggacagccattctccgaaggagcccggcacgaccatataaacaatcagcggtgccaccacactgatcagcgccacagacaaagcggtcaggttgttcttggcccatacggatgccatcagcacaaaggccacctccgcaaagaagatcaggaagtttgccaccagcatggcccactccatctgaccaacggtatacggcagcaggctggtcacagaaaacagccattgcacggaagtttgggtactttcccagccaaatagagcattcgtgaccaggatccacaccacgccgcagagcagatacgctgcccctgtgatactaaacgccgccgctagctttgccgctgctagccgcagaccgccgttttttgtgcacagttggatgtcctgcgccccggtctgtgcatccgatgcaaataccggggccgcaatcaccgcgcacagcagggtgagcagcaagctcaacagggtctggtaatccattgcgtctgaactgaccccaaatgaataggtgaacggtttttgtacagcatcgaactttttctgtgcaatggcctgcgcctgctcatagccgggctttccgctttgttccagccagatcaccgattccagccgtttggggagctggctgtaaaagttttgcatatcctctgcggtcagccccatcacgcccggtgccatgccggttttcgggtcggcaaaggcttcctttgcgttgttcacaagaggctgataccgggcaagttctttataaaatacctcgaccgggatatcgttgatggagcttgcatcatactgccggtacacccgctgataggcttccagtgcttcctgcatgacatccggcgtgatggtaccggatacctgctgctcctgccgtttccggattgctttcagacccgtgtaacgcacttcgtttccgccggcatccagttccgtccagccgataaaggtcaccggcagatatgccataaccacggccagcaccagtgcaatggccagcagaatagctgtcatacgggttttgcacacacgtttcaattccaaacgatacaggttcattttgcttcctccatttcctccgggaacagccacagatacagatcttccagccggggctgtgccgggacgctgtccggcagctgcggtgcatccgccagataccgcaatgttaccgttccgtccggctcgttgcgcaggttcactacccgcagccggtattcccaccgggcaagctgttccatcgggatattcccctgccagactttggcttcgatctgctttaccagcccttcggtggtgtcctgtgcaatgattttgccagccttcatcacggcattttcggccgcaatgtattccacatccgaaacgatatgcgttgaaatgagaacgatccgttcctgcgcaaactccgacagcagattgcggaagcgcacccgttctccggggtccagccctgccgtgggctcatctagaattaaaatttccgggtcgttgagcagtgcctgtgcgatgcctacccggcgcttcataccgccggaaagctttatgatctttttgcggcgcacctcaatgaggcttacccgctccagcagtgcgtcgatctgccgggcagcctctgtgtgcggcagacccttgagcgccgccatatattccagatagtcctgcaccgtgaattccgggtaaaacccgaattcctgcggcagataccccagcttttcccggtaggccgcaccaagtgttccaatctccaccccatcgcacaaaatccggccactgctgggccgcagaatgcccgccagcatccgcattaaggttgttttgcctgcaccattcgcccccagcagtccccacacacccggcgtgagagtgatagacacatcatccaccgccgttttatcccggtatcgctttgtaatattctgaattttcagttccatggcttgctcctttcagccttctgcaatatattctgaccgggcggcaagccggatgcactgcaacaccatacagagcaccagcacacccgccgccagcggcagacctttcggcagttccgacaatcgcacgaaccgcagcaaacacagctgccctgcaaacagcggtacagccccggtcatcatccattccgggcgcacccagcgcagcagcagaagcagctcattgtttgcagtcagaaatggcacggtcaacaccgccagcagttgcccgatgctccatggcacggctgcccgcacattgagtaccagcactcccagcaggatcatttcccccgccagcagcaacaaaaaccgcatcaccagtggacgaccgattccggcatatgtggcttgttccagttcaagcatcttatattgacttgcccggtataaaaacggcagaccgagcagggctgtcagcatggcaagggtgctcagaccaaacagtgcattgcgtaatgtccatgccttctcccacagggcaagttcccgacccacactgtacaacgccagtgccgccattgcttccagcacccagaccttccagcccagcaatttgaactggcagtgcagcaaatcacgccaatcactccgttgttttacgacatgttccgcccggcagcggcgcagcagcgttttcggtgcggctgtgtcaagctctgtcgccagtgctctggacagttctttttcaaaggctcgattcatctccagtcctccttttccaattgcattttcaaggttttcaatgcggcacgcaggcgggactgcactgtgcgcaggggcagacctgtaatctgcgcgatctcccgcaatttaagctgttgtgcgaaccgcagcaatacaagttcccgctgttccggctccagctgggccgtcagcgctcgcaggtttgctttctcctctgccgcagcaaagccgctttcctgataggcgggttcgcccggcaagctctccagcgatacctccgaccgctccatcgtacggttcagatcgatgcaaatgttttttgcgattttgtacagaaagggacggaatgccccctgaaatccaccacaggaatccagccagcgcaccgctttcaaaaaggtttcctgtgccgcatcctgtgcctgctgctcgtccgctgtatgccaacggcaatagttcagaatttgtggatagtacgctgtaatcagagtgtccagcgcacccgtatctccgctctgcactttccgcagcaataattctgtctggatacggttcacccccttcctgtctattaaaacgtcccatatcatcaaaatgatttctgttttttcaaaaatttcaaataattgcctttattatgttcttatagctttattataataaagagccttgtgtttttccttgtcaagagggctggcaccgtc
